(19) United States
(12) Patent Application Publication
(10) Pub. No.: US 2022/0290194 A1
(43) Pub. Date: Sep. 15, 2022

(54) CANNABIDIOLIC ACID SYNTHASE VARIANTS WITH IMPROVED ACTIVITY FOR USE IN PRODUCTION OF PHYTOCANNABINOIDS

(71) Applicant: Hyasynth Biologicals Inc., Montreal (CA)

(72) Inventors: Letian SONG, Montréal (CA); Timothy S. LIAO, Montréal (CA); Curtis WALTON, Montréal (CA); Louis HOM, Montréal (CA); Mindy MELGAR, Montréal (CA); Daniel FURLONG, Montréal (CA); Devanshi BHARGAVA, Montréal (CA); Sylvester PALYS, Montréal (CA); Leanne BOURGEOIS, Montréal (CA)

(21) Appl. No.: 17/828,449

(22) Filed: May 31, 2022

Related U.S. Application Data
(63) Continuation-in-part of application No. PCT/CA2021/051636, filed on Nov. 18, 2021.
(60) Provisional application No. 63/116,276, filed on Nov. 20, 2020.

(51) Int. Cl. C12P 7/42; C12N 9/02; C12N 9/10; C12N 9/88

(52) U.S. Cl. CPC C12P 7/42; C12Y 121/03008; C12N 9/0004; C12N 9/1029; C12Y 404/01026; C12N 9/88; C12N 9/1085; C12Y 205/01001

(57) ABSTRACT

The present disclosure relates generally to methods, isolated polypeptides and polynucleotides, expression vectors, and host cells for the production of cannabidiolic acid (CBDa), cannabigerolic acid (CBCa), and other phytocannabinoids. A method of producing CBDa, CBCa, and/or other phytocannabinoids in a heterologous host cell having CBDa-producing, CBCa-producing or phytocannabinoid-producing capacity comprises transforming the host cell with a nucleotide encoding a variant CBDa synthase protein having a serine insertion between residues P224 and K225 and one or more other amino acid mutation relative to wild type CBDa synthase, and culturing the transformed host cell to produce CBDa, CBCa, and/or other phytocannabinoids therefrom. The variant CBDa synthase protein has at least 85% sequence identity with the wild type CBDa synthase protein sequence OXC52 according to SEQ ID NO:140, with serine insertion (SEQ ID NO:141). Exemplary variants having good phytocannabinoid production capacity are described.

### CROSS REFERENCE TO RELATED APPLICATIONS

[0001] This application is the U.S. National Phase of International Patent Application No. PCT/CA2021/051636 filed Nov. 18, 2021 and is a Continuation-In-Part thereof. This application claims the benefit of and priority to International Patent Application No. PCT/CA2021/051636 filed Nov. 18, 2021, and U.S. Provisional Patent Application No. 63/116,276 filed Nov. 20, 2020, the contents of which are hereby incorporated by reference.

### FIELD

[0002] The present disclosure relates generally to proteins having cannabidiolic acid (CBDa) synthase activity, useful in production of phytocannabinoids.

### BACKGROUND

[0003] Phytocannabinoids are a large class of compounds with over 100 different known structures that are produced in the Cannabis sativa plant. Phytocannabinoids are known to be biosynthesized in C. sativa, or may result from thermal or other decomposition from phytocannabinoids biosynthesized in C. sativa. These bio-active molecules, such as tetrahydrocannabinol (THC), cannabidiol (CBD), and cannabichromene (CBC) can be extracted from plant material for medical and recreational purposes. However, the synthesis of plant material is costly, not readily scalable to large volumes, and requires lengthy growing periods to produce sufficient quantities of phytocannabinoids. While the C. sativa plant is also a valuable source of grain, fiber, and other material, growing C. sativa for phytocannabinoid production, particularly indoors, is costly in terms of energy and labour. Subsequent extraction, purification, and fractionation of phytocannabinoids from the C. sativa plant is also labour and energy intensive.

[0004] Phytocannabinoids are pharmacologically active molecules that contribute to the medical and psychotropic effects of C. sativa. Biosynthesis of phytocannabinoids in the C. sativa plant scales similarly to other agricultural projects. As with other agricultural projects, large scale production of phytocannabinoids by growing C. sativa requires a variety of inputs (e.g. nutrients, light, pest control, CO, etc.). The inputs required for cultivating C. sativa must be provided. In addition, cultivation of C. sativa, where allowed, is currently subject to heavy regulation, taxation, and rigorous quality control where products prepared from the plant are for commercial use, further increasing costs.

[0005] Phytocannabinoid analogues are pharmacologically active molecules that are structurally similar to phytocannabinoids. Phytocannabinoid analogues are often synthesized chemically, which can be labour intensive and costly. As a result, it may be economical to produce the phytocannabinoids and phytocannabinoid analogues in a robust and scalable, fermentable organism. Saccharomyces cerevisiae is an example of a fermentable organism that has been used to produce industrial scales of similar molecules.

[0006] The extensive time, energy, and labour involved in growing C. sativa for production of naturally-occurring phytocannabinoids provides a motivation to produce phytocannabinoids by other means such as through heterologous pathways in transgenic cell lines. Biosynthesis of phytocannabinoids in C. sativa can include those formed from cannabigerolic acid (CBGa). For example, CBGa may be oxidatively cyclized into cannabidiolic acid (CBDa) by CBDa synthase (Taura et al., 1996).

[0007] In addition, it is desirable to find alternative enzymes and methods for the production of phytocannabinoids, and/or for the production of compounds useful in phytocannabinoid biosynthesis as intermediate or precursor compounds.

### SUMMARY

[0008] Cannabidiolic acid (CBDa) synthase catalyzes the stereoselective oxidative cyclization of the monoterpene moiety in cannabigerolic acid (CBGa), producing cannabidiolic acid (CBDa). As referenced herein, wild type CBDa synthase (or “OXC52”), can be modified with the insertion of a serine between positions 224 and 225 in the OXC52 sequence, thereby creating a new protein (hereby referred to interchangeably as “OXC154”) with significantly improved CBDa production as compared with OXC52. OXC154 is described in Applicant's co-pending application PCT/CA2020/050687, which is herein incorporated by reference. Variants of OXC154 are described herein that have increased CBDa synthase activity and/or decreased tetrahydrocannabinolic acid (THCa) synthase activity. Exemplary variants are produced in a host cell, showing improved CBDa and/or reduced THCa production. The described variants are useful in the production of cannabidiolic acid and downstream phytocannabinoids in a heterologous host. Methods of production are described.

[0009] In certain aspects described, OXC154 variants comprise at least one non-conservative substitution amino acid mutation relative to unmodified OXC154. Certain variants described have improved CBDa synthase activity in comparison to OXC52 and/or OXC154.

[0010] A method is described herein for producing cannabidiolic acid (CBDa) cannabichromenic acid (CBCa), or another phytocannabinoid produced therefrom in a heterologous host cell having CBDa-producing, CBCa-producing, or other phytocannabinoid-producing capacity. The method comprises transforming the host cell with a nucleotide encoding a variant cannabidiolic acid (CBDa) synthase protein having a serine insertion between P224 and K225 and one or more other amino acid mutation relative to the wild type CBDa synthase protein OXC52 (SEQ ID NO:140), and culturing the transformed host cell to produce CBDa, CBCa, and/or another phytocannabinoid therefrom, wherein the variant CBDa synthase protein comprises at least 85%, 90%, 95%, or 99% sequence identity with the wild type CBDa synthase protein sequence.

[0011] An isolated polypeptide having cannabidiolic acid synthase activity is described, which has an amino acid sequence according to SEQ ID NO:207, wherein 1 or more amino acid residues comprise mutations relative to OXC154 (SEQ ID NO:141). The one or more mutation is located at a position selected from the group consisting of: residues 2, 3, 5, 18, 21, 26, 28, 31, 47, 49, 60, 88, 97, 225, 274, 295, 331, 347, 349, 351, 367, 372, 383, 399, 451, 513, or 515 of SEQ ID NO:141, such as at least at residue 451.

[0012] An isolated polynucleotide is described, comprising (a) a nucleotide sequence according to SEQ ID NO:4-SEQ ID NO:71; SEQ ID NO:157-160, SEQ ID NO:165-172, or SEQ ID NO:181-188, SEQ ID NO: 209-210 such as for example SEQ ID NO:187; (b) a nucleotide sequence having at least 85%, at least 90%, at least 95%, at least 99%, or of 100% identity with the nucleotide sequence of (a); or (c) a nucleotide sequence that hybridizes with the complementary strand of the nucleotide having the sequence of (a).

[0013] Expression vectors comprising the polynucleotide, and host cells transformed with such expression vectors are described.

[0014] Other aspects and features of the present disclosure will become apparent to those ordinarily skilled in the art upon review of the following description of specific embodiments in conjunction with the accompanying figures.

### BRIEF DESCRIPTION OF THE FIGURES

[0015] Embodiments of the present disclosure will now be described, by way of example only, with reference to the attached Figures.

[0016] FIG. 1 illustrates a cannabinoid biosynthesis pathway in Cannabis sativa.

[0017] FIG. 2 illustrates a cannabinoid biosynthesis pathway as described in Applicant's co-pending International Application No: PCT/CA2020/050687.

[0018] FIG. 3 illustrates PCR primers used in site-saturation mutagenesis protocol.

[0019] FIG. 4 shows stagger-arrayed mutagenic oligonucleotides for combinatorial library construction. The symbol x represents a point mutation.

[0020] FIG. 5 shows CBDa production in OXC154 variants.

[0021] FIG. 6 shows CBDa production in OXC161 variants in Example 2.

[0022] FIG. 7 shows CBDa production values in Example 3.

[0023] FIG. 8 shows CBDa production in strains expressing OXC158 variants identified through a combinatorial library in Example 4.

[0024] FIG. 9 shows the cannabivarinic acid biosynthesis pathway in Cannabis sativa.

[0025] FIG. 10 shows UV spectra of varinoid standards in Example 5.

[0026] FIG. 11 shows UV spectra for CBGVa control strain (HB3292, no oxidocyclase).

[0027] FIG. 12 shows UV spectra CBDVa strain (HB3291).

[0028] FIG. 13 shows CBDVa and intermediate products in strains expressing OXC154 variants identified through a combinatorial library.

[0029] FIG. 14A shows panels A to D illustrating production of meroterpenoids in Example 6 in which HB3167 show red fluorescent protein control (RFP).

[0030] FIG. 14B shows panels E to H illustrating production of meroterpenoids in Example 6 in which HB3167 show red fluorescent protein control production of meroterpenoids in HB3167 transformed with OXC157.

### DETAILED DESCRIPTION

[0031] A method is described for producing cannabidiolic acid (CBDa), cannabichromenic acid, or another phytocannabinoid produced therefrom in a heterologous host cell having CBDa-producing, CBCa-producing, or phytocannabinoid-producing capacity. The method comprises transforming the host cell with a nucleotide encoding a variant cannabidiolic acid (CBDa) synthase protein having a serine insertion between residues P224 and K225, as well as one or more other amino acid mutation relative to the wild type CBDa synthase protein OXC52 (SEQ ID NO:140). The transformed host cell is cultured to produce CBDa, CBCa, and/or a phytocannabinoid therefrom, wherein the variant CBDa synthase protein (referenced interchangeably herein as the OXC154 variant) comprises at least 85%, 90%, 95%, or 99% sequence identity with the wild type CBDa synthase protein sequence.

[0032] The one or more other amino acid mutation, aside from the serine insertion that is S225 in OXC154, is at a location selected from the group consisting of: residues 451, 2, 3, 5, 18, 21, 26, 28, 31, 47, 49, 60, 88, 97, 225, 274, 295, 331, 347, 349, 351, 367, 372, 383, 399, 513, and/or 515 OXC154 (SEQ ID NO:141), for example, at least at residue 451. The one or more other mutation may be a conservative or a non-conservative amino acid substitution, and in an exemplary embodiment is a non-conservative substitution. The variant CBDa synthase protein may have a non-conservative amino acid substitution in 2 or more of the noted residues. Optionally, the OXC154 variant protein may additionally have one or more amino acid mutation at a location other than the specified residues (2, 3, 5, 18, 21, 26, 28, 31, 47, 49, 60, 88, 97, 225, 274, 295, 331, 347, 349, 351, 367, 372, 383, 399, 451, 513, or 515 of SEQ ID NO:141) in which the mutation is a conservative amino acid substitution, provided at least 85%, 90%, 95% or 99% sequence identity is maintained, and CBDa synthase activity relative to wild type (OXC52) is maintained.

[0033] In an embodiment of the described method, the nucleotide encoding the variant CBDa synthase protein may have a sequence comprising: (a) a nucleotide sequence according to SEQ ID NO:4-SEQ ID NO:71, SEQ ID NO:157-160, SEQ ID NO:165-172, SEQ ID NO:181-188, or SEQ ID NO: 209-210; (b) a nucleotide sequence having at least 85%, 90%, 95% or 99% identity with the sequence of (a); or (c) a nucleotide sequence that hybridizes with the complementary strand of the nucleotide having the sequence of (a), for example, SEQ ID NO:187.

[0034] Further, in certain embodiments, the variant CBDa synthase protein may comprise a sequence selected from the group consisting of SEQ ID NO:72 to SEQ ID NO:139, SEQ ID NO:161-164, SEQ ID NO:173-180, or SEQ ID NO:189-196, SEQ ID NO:211, or a sequence of at least 85%, 90%, 95%, or 99% identity thereto, for example, SEQ ID NO:195.

[0035] In exemplary embodiments, at least 1 of the one or more other amino acid or codon mutations relative to the wild type CBDa synthase protein OXC52 (SEQ ID NO:140) may be mutations selected from the group consisting of: P2W; R3G, R3T, R3W, R3V, or R3A; NSQ; A18E; L21G; T26A; N28E; L31E; S47F; T49R; S60T; S88A; V97E or V97D; Q274G; N331G; A347G; Q349G; G351I, G351R, or G351M; S367Q; S367N; S367R; or S367K; I372L; A383V; V383A; V383M; V383G; S399G; L451G, P513V; and/or H515E, L451G, based on the residues of OXC154 (SEQ ID NO:141), which mutations are represented by “Xaa” in the variant OXC154 of SEQ ID NO:207.

[0036] In the described method, the host cell may be transformed with a nucleotide encoding: (a) a variant CBDa synthase protein with at least 85%, at least 90%, at least 95%, at least 99%, or 100% sequence identity of any one of the following sequences with the indicated substitutions from OXC154 (SEQ ID NO:141):

[0037] OXC154-S88A/L451G (SEQ ID NO:72),

[0038] OXC154-R3G/L21G/S60T/S88A (SEQ ID NO:73),

[0039] OXC154-R3G/A18E/T49R/S60T/S88A (SEQ ID NO:74),

[0040] OXC154-R3T/T49R/S88A (SEQ ID NO:75),

[0041] OXC154-R3W/A18E/T49R/S60T/S88A (SEQ ID NO:76),

[0042] OXC154-R3V/T49R/S60T/S88A (=GCT) (SEQ ID NO:77),

[0043] OXC154-R3V/T49R/S60T/S88A (=GCC) (SEQ ID NO:78),

[0044] OXC154-A18A (SEQ ID NO:79),

[0045] OXC154-R3T/A18E/T49R/S88A (=GCC) (SEQ ID NO:80),

[0046] OXC154-R3T/S88A (=GCC) (SEQ ID NO:81),

[0047] OXC154-R3G(=GGG)/L21G/T49R (=GCC) (SEQ ID NO:82),

[0048] OXC154-R3T/T49R/S88A(=GCT) (SEQ ID NO:83),

[0049] OXC154-R3G(=GGA)/A18E/T49R/S60T/S88A(=GCC) (SEQ ID NO:84),

[0050] OXC154-R3W/T49R/S88A(=GCC)/V97E (SEQ ID NO:85),

[0051] OXC154-R3G(=GGG)/A18E/S88A(=GCC) (SEQ ID NO:86),

[0052] OXC154-R3V/A18E/T49R/S60T/S88A(=GCC) (SEQ ID NO:87),

[0053] OXC154-S60T/S88A(=GCC) (SEQ ID NO:88),

[0054] OXC154-R3T/A18E/T49R/S60T/S88A(=GCT) (SEQ ID NO:89),

[0055] OXC154-R3W/L21G/T49R/S88A(=GCC)/V97E (SEQ ID NO:90),

[0056] OXC154-R3T/A18E/T49R/S60T (SEQ ID NO:91),

[0057] OXC154-P2W/T26A/S60T (SEQ ID NO:91),

[0058] OXC154-R3G(=GGG)/L21G/S60T/S88A(=GCC)/V97E (SEQ ID NO:93),

[0059] OXC154-R3G(=GGG)/A18E/T49R/S88A(=GCC) (SEQ ID NO:94),

[0060] OXC154-R3T/L21G/S60T/S88A(=GCC)/V97D (SEQ ID NO:95),

[0061] OXC154-P2W/L21G/T49R/S88A(=GCC)/V97E (SEQ ID NO:96),

[0062] OXC154-R3G(=GGG)/L21G/T49R/S88A(=GCT) (SEQ ID NO:97),

[0063] OXC154-S295S(=TCA) (SEQ ID NO:98),

[0064] OXC154-R3V/L21G/S60T/S88A(=GCC) (SEQ ID NO:99),

[0065] OXC154-R3T/A18E/S88A(=GCC) (SEQ ID NO:100),

[0066] OXC154-S60T/S88A(=GCT) (SEQ ID NO:101),

[0067] OXC154-R3W/T49R/S88A(=GCT) (SEQ ID NO:102),

[0068] OXC154-T49R/S88A(=GCC) (SEQ ID NO:103),

[0069] OXC154-R3W/S47F (SEQ ID NO:104),

[0070] OXC154-A347G/I372L/L451G (SEQ ID NO:105),

[0071] OXC154-R3G(=GGG)/L21G/S60T (SEQ ID NO:106),

[0072] OXC154-R3T/L21G/T49R/S88A(=GCT) (SEQ ID NO:107),

[0073] OXC154-R3T/L21G/S60T (SEQ ID NO:108),

[0074] OXC154-R3W/L21G/S88A(=GCT) (SEQ ID NO:109),

[0075] OXC154-L21G/T49R/S60T/S88A(=GCT) (SEQ ID NO:110),

[0076] OXC154-A347G/A383V (SEQ ID NO:111),

[0077] OXC154-R3W/L21G/T49R/S60T/S88A(=GCT) (SEQ ID NO:112),

[0078] OXC154-A18E/S88A(=GCC) (SEQ ID NO:113),

[0079] OXC154-R3W/L21G/T49R (SEQ ID NO:114),

[0080] OXC154-A347G/L451G (SEQ ID NO:115),

[0081] OXC154-A347G/I372L/A383V/L451G (SEQ ID NO:116),

[0082] OXC154-I372L/A383V/L451G (SEQ ID NO:117),

[0083] OXC154-R3V/T49R/S88A(=GCT) (SEQ ID NO: 118),

[0084] OXC154-R3G(=GGG)/A18E/S60T (SEQ ID NO:119),

[0085] OXC154-A347G/I372L/A383V (SEQ ID NO:120),

[0086] OXC154-R3T (SEQ ID NO:121),

[0087] OXC154-R3V/A18E/T49R/V97E (SEQ ID NO:122),

[0088] OXC154-R3T/L21G/T49R/S60T/S88A(=GCT) (SEQ ID NO:123),

[0089] OXC154-R3T/L21G/T49R/V97E (SEQ ID NO:124),

[0090] OXC154-R3V/L21G/T49R/S60T (SEQ ID NO:125),

[0091] OXC154-G351I/1372L (SEQ ID NO:126),

[0092] OXC154-G351I/A383V/L451G (SEQ ID NO:127),

[0093] OXC154-G351R/I372L/L451G (SEQ ID NO:128),

[0094] OXC154-G351I/I372L/A383V/L451G (SEQ ID NO:129),

[0095] OXC154-G351R/I372L/A383V/L451G (SEQ ID NO:130),

[0096] OXC154-G351I/I372L/A383V (SEQ ID NO:131),

[0097] OXC154-N331G/Q349G/I372L/L451G (SEQ ID NO:132),

[0098] OXC154-G351R/A383V/L451G (SEQ ID NO:133),

[0099] OXC154-Q349G/A383V/L451G (SEQ ID NO:134),

[0100] OXC154-A383V/L451G (SEQ ID NO:135),

[0101] OXC154-N331G/Q349G (SEQ ID NO:136),

[0102] OXC154-G351I (SEQ ID NO:137),

[0103] OXC154-L451G (SEQ ID NO:138),

[0104] OXC154-N331G/G351I/1372L/A383V (SEQ ID NO:139),

[0105] OXC154-R3G/A18E/S60T/G351I/A383V/L451G (SEQ ID NO:161),

[0106] OXC154-R3W/A18E/T49R/V97E/G351I/A383V/L451G (SEQ ID NO:162),

[0107] OXC154-R3W/A18E/T49R/V97E/G351I/A383V/L451G (SEQ ID NO:163),

[0108] OXC154-R3T/S60T/G351I/A383V/L451G (SEQ ID NO:164), or

[0109] OXC154-R3G/A18E/S60T/G351I/A383V/L451G (SEQ ID NO: 211).

[0110] Alternatively, the cell may be transformed with a nucleotide encoding a variant CBDa synthase protein with at least 85%, at least 90%, at least 95%, at least 99% sequence identity, or with 100% identity with any one of the following sequences with the further indicated substitutions from OXC158 (SEQ ID NO:162):

[0111] OXC158-W3A/I351G/V383A (SEQ ID NO:195),

[0112] OXC158-I351G (SEQ ID NO:173),

[0113] OXC158-S367R(=CGG) (SEQ ID NO:174),

[0114] OXC158-Q274G (SEQ ID NO:175),

[0115] OXC158-I351M (SEQ ID NO:176),

[0116] OXC158-V383A (SEQ ID NO:177),

[0117] OXC158-S367Q (SEQ ID NO:178),

[0118] OXC158-S367N (SEQ ID NO:179),

[0119] OXC158-S367R(=AGG) (SEQ ID NO:180),

[0120] OXC158-L31E/V383G (SEQ ID NO:189),

[0121] OXC158-N138T/V383M/H515E (SEQ ID NO:190),

[0122] OXC158-S367K/V383A/P513V (SEQ ID NO:191),

[0123] OXC158-V383A (SEQ ID NO:192),

[0124] OXC158-W3A/L31E/K226M/S367Q/V383M/S399G/P513V (SEQ ID NO:193),

[0125] OXC158-I351GN383A (SEQ ID NO:194), or

[0126] OXC158-W3A/N5Q/N28E/I351G/S367R/V383A (SEQ ID NO:196).

[0127] Of these, one exemplary sequence is OXC158-W3A/I351G/V383A (SEQ ID NO:195).

[0128] In the method, the production of a phytocannabinoid by the transformed host cell may involve production of phytocannabinoids including but not limited to cannabigerol (CBG), cannabigerolic acid (CBGa), cannabigerovarin (CBGv), cannabigerovarinic acid (CBGVa), cannabigerocin (CBGO), cannabigerocinic acid (CBGOa), cannabidiovarinic acid (CBDVa), cannabichromenic acid (CBCa), cannabichromene (CBC), tetrahydrocannabinol (THC), or tetrahydrocannabinolic acid (THCa). For example, the transformed host cell may produce cannabidiovarinic acid (CBDVa) from cannabigerovarinic acid (CBGVa). Further, when the transformed host cell is one that produces cannabidiovarinic acid (CBDVa) from cannabigerovarinic acid (CBGVa), this may be done in the presence of endogenously produced or exogenously provided butyric acid.

[0129] The host cell transformed in the method described may be a yeast cell, a bacterial cell, a fungal cell, a protist cell, or a plant cell. Exemplary organisms include S. cerevisiae, E. coli, Yarrowia lipolytica, or Komagataella phaffii, as well as others described herein. The transformed host cell may additionally comprise, or be transformed with, other enzymes useful in phytocannabinoid production. For example, a polynucleotide encoding a polyketide synthase enzyme, a polynucleotide encoding an olivetolic acid cyclase enzyme, and/or a polynucleotide encoding a prenyltransferase enzyme may also be included in the host cell. Further options for polynucleotides and methods, such as described in Applicant's co-pending International Application No: PCT/CA2020/050687 (hereby incorporated by reference) are envisioned. The transformed host cell may comprises a polynucleotide encoding a type III PKS, an acyl-activating enzyme, a prenyltransferase enzyme, and/or an oxidocyclase enzyme.

[0130] An isolated polypeptide is described herein, having cannabidiolic acid synthase activity and comprising an amino acid sequence of at least 85%, of at least 90%, of at least 95%, of at least 99%, or of 100% sequence identity relative to OXC154 (SEQ ID NO:141), wherein 1 or more amino acid residues comprise mutations relative to OXC154 (SEQ ID NO:141), at least one of said one or more mutation being located at a position selected from the group consisting of: residues 2, 3, 5, 18, 21, 26, 28, 31, 47, 49, 60, 88, 97, 225, 274, 295, 331, 347, 349, 351, 367, 372, 383, 399, 451, 513, or 515 of SEQ ID NO:141 of SEQ ID NO:141. The isolated polypeptide may comprise an amino acid sequence according to SEQ ID NO:72-SEQ ID NO:139, SEQ ID NO:161-164, SEQ ID NO:173-180, or SEQ ID NO:189-196, for example SEQ ID NO:195.

[0131] An isolated polynucleotide is described, comprising: (a) a nucleotide sequence according to SEQ ID NO:4-SEQ ID NO:71, SEQ ID NO:157-160, SEQ ID NO:165-172, or SEQ ID NO:181-188 (b) a nucleotide sequence having at least 85%, 90%, 95%, or 99% identity with the nucleotide sequence of (a), or (c) a nucleotide sequence that hybridizes with the complementary strand of the nucleotide having the sequence of (a).

[0132] An expression vector comprising the polynucleotide is described, such that the vector encodes a variant CBDa synthase protein with a sequence as described, with CBDa synthase activity. Such an expression vector encodes the variant CBDa synthase protein by comprising a nucleotide sequence according to any of SEQ ID NO:4 to SEQ ID NO:71; SEQ ID NO:157-160, SEQ ID NO:165-172, or SEQ ID NO:181-188, or having 85%, 90%, 95%, 99% identity to these sequences.

[0133] A host cell transformed with the expression vector as described may additionally comprise a polynucleotide encoding a polyketide synthase enzyme, a polynucleotide encoding an olivetolic acid cyclase enzyme, and/or a polynucleotide encoding a prenyltransferase enzyme. Such a host cell may comprise a polynucleotide encoding other enzymes useful in synthesis of olivetolic acid and/or phytocannabinoids. The host cell may comprises a polynucleotide encoding a type III PKS, an acyl-activating enzyme, a prenyltransferase enzyme, and/or an oxidocyclase enzyme. The host cell may be a yeast, a bacterial cell, a fungal cell, a protist cell, or a plant cell, for example: S. cerevisiae, E. coli, Yarrowia lipolytica, or Komagataella phaffii.

### Definitions

[0134] Certain terms used herein are described below.

[0135] The term “cannabinoid” as used herein refers to a chemical compound that shows direct or indirect activity at a cannabinoid receptor. Non limiting examples of cannabinoids include tetrahydrocannabinol (THC), cannabidiol (CBD), cannabinol (CBN), cannabigerol (CBG), cannabichromene (CBC), cannabicyclol (CBL), cannabivarin (CBV), tetrahydrocannabivarin (THCV), cannabidivarin (CBDV), cannabichromevarin (CBCV), cannabigerovarin (CBGV), and cannabigerol monomethyl ether (CBGM).

[0136] The term “phytocannabinoid” as used herein refers to a cannabinoid that typically occurs in a plant species. Exemplary phytocannabinoids produced according to the invention include cannabigerol (CBG); cannabigerolic acid (CBGa); cannabivarins such as cannabigerovarin (CBGV), cannabigerovarinic acid (CBGVa), or cannabidiovarinic acid (CBDVa); cannabigerocin (CBGo); or cannabigerocinic acid (CBGoa).

[0137] Cannabinoids and phytocannabinoids may contain or may lack one or more carboxylic acid functional groups. Non limiting examples of such cannabinoids or phytocannabinoids containing carboxylic acid function groups or phytocannabinoids include tetrahydrocannabinolic acid (THCA), cannabidiolic acid (CBDA), and cannabichromenic acid (CBCA).

[0138] The term “homologue” includes homologous sequences from the same and other species and orthologous sequences from the same and other species. Different polynucleotides or polypeptides having homology may be referred to as homologues.

[0139] The term “homology” may refer to the level of similarity between two or more polynucleotide and/or polypeptide sequences in terms of percent of positional identity (i.e., sequence similarity or identity). Homology also refers to the concept of similar functional properties among different polynucleotide or polypeptides. Thus, the compositions and methods herein may further comprise homologues to the polypeptide and polynucleotide sequences described herein.

[0140] The term “orthologous,” as used herein, refers to homologous polypeptide sequences and/or polynucleotide sequences in different species that arose from a common ancestral gene during speciation.

[0141] As used herein, a “homologue” may have a significant sequence identity (e.g., 70%, 71%, 72%, 73%, 74%, 75%, 76%, 77%, 78%, 79%, 80%, 81%, 82%, 83%, 84%, 85%, 86%, 87%, 88%, 89%, 90%, 91%, 92%, 93%, 94%, 95%, 96%, 97%, 98%, or 99% and/or 100%) to the polynucleotide sequences herein.

[0142] As used herein “sequence identity” refers to the extent to which two optimally aligned polynucleotide or peptide sequences are invariant throughout a window of alignment of components, e.g., nucleotides or amino acids. “Identity” can be readily calculated by known methods.

[0143] As used herein, the term “percent sequence identity” or “percent identity” refers to the percentage of identical nucleotides in a linear polynucleotide sequence of a reference (“query”) polynucleotide molecule (or its complementary strand) as compared to a test (“subject”) polynucleotide molecule (or its complementary strand) when the two sequences are optimally aligned. In some embodiments, “percent identity” can refer to the percentage of identical amino acids in an amino acid sequence.

[0144] The terms “fatty acid-CoA”, “fatty acyl-CoA”, or “CoA donors” as used herein may refer to compounds useful in polyketide synthesis as primer molecules which react in a condensation reaction with an extender unit (such as malonyl-CoA) to form a polyketide. Examples of fatty acid-CoA molecules (also referred to herein as primer molecules or CoA donors), useful in the synthetic routes described herein include but are not limited to: acetyl-CoA, butyryl-CoA, hexanoyl-CoA. These fatty acid-CoA molecules may be provided to host cells or may be synthesized by the host cells for biosynthesis of polyketides, as described herein.

[0145] Two nucleotide sequences can be considered to be substantially “complementary” when the two sequences hybridize to each other under stringent conditions. In some examples, two nucleotide sequences considered to be substantially complementary hybridize to each other under highly stringent conditions.

[0146] The terms “stringent hybridization conditions” and “stringent hybridization wash conditions” in the context of nucleic acid hybridization experiments, for example in Southern hybridizations and Northern hybridizations are sequence dependent, and are different under different environmental parameters. In some examples, generally, highly stringent hybridization and wash conditions are selected to be about 5° C. lower than the thermal melting point (Tm) for the specific sequence at a defined ionic strength and pH.

[0147] In some examples, polynucleotides include polynucleotides or “variants” having at least about 50%, 55%, 60%, 65%, 70%, 75%, 80%, 85%, 90%, 95%, 96%, 97%, 98%, 99% or 100% sequence identity to any of the reference sequences described herein, typically where the variant maintains at least one biological activity of the reference sequence.

[0148] As used herein, the terms “polynucleotide variant” and “variant” and the like refer to polynucleotides displaying substantial sequence identity with a reference polynucleotide sequence or polynucleotides that hybridize with a reference sequence under, for example, stringent conditions. These terms may include polynucleotides in which one or more nucleotides have been added or deleted, or replaced with different nucleotides compared to a reference polynucleotide. It will be understood that certain alterations inclusive of mutations, additions, deletions and substitutions can be made to a reference polynucleotide whereby the altered polynucleotide retains the biological function or activity of the reference polynucleotide.

[0149] In some examples, the polynucleotides described herein may be included within “vectors” and/or “expression cassettes”.

[0150] In some embodiments, the nucleotide sequences and/or nucleic acid molecules described herein may be “operably” or “operatively” linked to a variety of promoters for expression in host cells. Thus, in some examples, the invention provides transformed host cells and transformed organisms comprising the transformed host cells, wherein the host cells and organisms are transformed with one or more nucleic acid molecules/nucleotide sequences of the invention. As used herein, “operably linked to,” when referring to a first nucleic acid sequence that is operably linked to a second nucleic acid sequence, means a situation when the first nucleic acid sequence is placed in a functional relationship with the second nucleic acid sequence. For instance, a promoter is operably associated with a coding sequence if the promoter effects the transcription or expression of the coding sequence.

[0151] In the context of a polypeptide, “operably linked to,” when referring to a first polypeptide sequence that is operably linked to a second polypeptide sequence, refers to a situation when the first polypeptide sequence is placed in a functional relationship with the second polypeptide sequence.

[0152] The term “promoter,” as used herein, refers to a nucleotide sequence that controls or regulates the transcription of a nucleotide sequence (i.e., a coding sequence) that is operably associated with the promoter. Typically, a “promoter” refers to a nucleotide sequence that contains a binding site for RNA polymerase II and directs the initiation of transcription. In general, promoters are found 5′, or upstream, relative to the start of the coding region of the corresponding coding sequence. The promoter region may comprise other elements that act as regulators of gene expression.

[0153] Promoters can include, for example, constitutive, inducible, temporally regulated, developmentally regulated, chemically regulated, tissue-preferred and tissue-specific promoters for use in the preparation of recombinant nucleic acid molecules, i.e., chimeric genes.

[0154] The choice of promoter will vary depending on the temporal and spatial requirements for expression, and also depending on the host cell to be transformed. Thus, for example, where expression in response to a stimulus is desired a promoter inducible by stimuli or chemicals can be used. Where continuous expression at a relatively constant level is desired throughout the cells or tissues of an organism a constitutive promoter can be chosen.

[0155] In some examples, vectors may be used.

[0156] In some examples, the polynucleotide molecules and nucleotide sequences described herein can be used in connection with vectors.

[0157] The term “vector” refers to a composition for transferring, delivering or introducing a nucleic acid or polynucleotide into a host cell. A vector may comprise a polynucleotide molecule comprising the nucleotide sequence(s) to be transferred, delivered or introduced. Non-limiting examples of general classes of vectors include, but are not limited to, a viral vector, a plasmid vector, a phage vector, a phagemid vector, a cosmid, a fosmid, a bacteriophage, or an artificial chromosome. The selection of a vector will depend upon the preferred transformation technique and the target species for transformation.

[0158] As used herein, “expression vectors” refers to a nucleic acid molecule comprising a nucleotide sequence of interest, wherein said nucleotide sequence is operatively associated with at least a control sequence (e.g., a promoter). Thus, some examples provide expression vectors designed to express the polynucleotide sequences described herein.

[0159] An expression vector comprising a polynucleotide sequence of interest may be “chimeric”, meaning that at least one of its components is heterologous with respect to at least one of its other components. An expression cassette may also be one that is naturally occurring but has been obtained in a recombinant form useful for heterologous expression. In some examples, however, the expression vector is heterologous with respect to the host. For example, the particular polynucleotide sequence of the expression vector does not occur naturally in the host cell and must have been introduced into the host cell or an ancestor of the host cell by a transformation event.

[0160] In some examples, an expression vector may also include other regulatory sequences. As used herein, “regulatory sequences” means nucleotide sequences located upstream (5′ non-coding sequences), within or downstream (3′ non-coding sequences) of a coding sequence, and which influence the transcription, RNA processing or stability, or translation of the associated coding sequence. Regulatory sequences include, but are not limited to, promoters, enhancers, introns, 5′ and 3′ untranslated regions, translation leader sequences, termination signals, and polyadenylation signal sequences.

[0161] An expression vector may also include a nucleotide sequence for a selectable marker, which can be used to select a transformed host cell.

[0162] As used herein, “selectable marker” means a nucleotide sequence that when expressed imparts a distinct phenotype to the host cell expressing the marker and thus allows such transformed host cells to be distinguished from those that do not have the marker. Such a nucleotide sequence may encode either a selectable or screenable marker, depending on whether the marker confers a trait that can be selected for by chemical means, such as by using a selective agent (e.g., an antibiotic, a sugar, a carbon source, or the like), or on whether the marker is simply a trait that one can identify through observation or testing, such as by screening. Examples of suitable selectable markers are known in the art and can be used in the expression vectors described herein.

[0163] The vector and/or expression vectors and/or polynucleotides may be introduced into a cell.

[0164] The term “introducing,” in the context of a nucleotide sequence of interest (e.g., the nucleic acid molecules/constructs/expression vectors), refers to presenting the nucleotide sequence of interest to cell host in such a manner that the nucleotide sequence gains access to the interior of a cell. Where more than one nucleotide sequence is to be introduced these nucleotide sequences can be assembled as part of a single polynucleotide or nucleic acid construct, or as separate polynucleotide or nucleic acid constructs, and can be located on the same or different transformation vectors. Accordingly, these polynucleotides may be introduced into host cells in a single transformation event, or in separate transformation events.

[0165] As used herein, the term “contacting” refers to a process by which, for example, a compound may be delivered to a cell. The compound may be administered in a number of ways, including, but not limited to, direct introduction into a cell (i.e., intracellularly) and/or extracellular introduction into a cavity, interstitial space, or into the circulation of the organism.

[0166] The term “transformation” or “transfection” as used herein refers to the introduction of a polynucleotide or heterologous nucleic acid into a cell. Transformation of a cell may be stable or transient.

[0167] The term “transient transformation” as used herein in the context of a polynucleotide refers to a polynucleotide introduced into the cell and does not integrate into the genome of the cell.

[0168] The terms “stably introducing” or “stably introduced” in the context of a polynucleotide introduced into a cell is intended to represent that the introduced polynucleotide is stably incorporated into the genome of the cell, and thus the cell is stably transformed with the polynucleotide.

[0169] The term “host cell” includes an individual cell or cell culture which can be or has been a recipient of any recombinant vector(s) or isolated polynucleotide of the invention. Host cells include progeny of a single host cell, and the progeny may not necessarily be completely identical (in morphology or in total DNA complement) to the original parent cell due to natural, accidental, or deliberate mutation and/or change. A host cell includes cells transformed in vivo or in vitro with a recombinant vector or a polynucleotide of the invention. A host cell which comprises a recombinant vector of the invention is a recombinant host cell.

[0170] In some examples, a host cell may be a bacterial cell, a fungal cell, a protist cell, or a plant cell. Specific examples of host cells are described below.

[0171] “Conversion” refers to the enzymatic transformation of a substrate to the corresponding product. “Percent conversion” refers to the percent of the substrate that is converted to the product within a period of time under specified conditions. Thus, for example, the “activity” or “conversion rate” of a ketoreductase polypeptide can be expressed as “percent conversion” of the substrate to the product.

[0172] “Hydrophilic Amino Acid or Residue” refers to an amino acid or residue having a side chain exhibiting a hydrophobicity of less than zero according to the normalized consensus hydrophobicity scale Eisenberg et al., 1984. Genetically encoded hydrophilic amino acids include L-Thr (T), L-Ser (S), L-His (H), L-Glu (E), L-Asn (N), L-Gln (Q), L-Asp (D), L-Lys (K) and L-Arg (R).

[0173] “Acidic Amino Acid or Residue” refers to a hydrophilic amino acid or residue having a side chain exhibiting a pKa value of less than about 6 when the amino acid is included in a peptide or polypeptide. Acidic amino acids typically have negatively charged side chains at physiological pH due to loss of a hydrogen ion. Genetically encoded acidic amino acids include L-Glu (E) and L-Asp (D).

[0174] “Basic Amino Acid or Residue” refers to a hydrophilic amino acid or residue having a side chain exhibiting a pKa value of greater than about 6 when the amino acid is included in a peptide or polypeptide. Basic amino acids typically have positively charged side chains at physiological pH due to association with hydronium ion. Genetically encoded basic amino acids include L-Arg (R) and L-Lys (K).

[0175] “Polar Amino Acid or Residue” refers to a hydrophilic amino acid or residue having a side chain that is uncharged at physiological pH, but which has at least one bond in which the pair of electrons shared in common by two atoms is held more closely by one of the atoms. Genetically encoded polar amino acids include L-Asn (N), L-Gln (Q), L-Ser (S) and L-Thr (T).

[0176] “Hydrophobic Amino Acid or Residue” refers to an amino acid or residue having a side chain exhibiting a hydrophobicity of greater than zero according to the normalized consensus hydrophobicity scale (Eisenberg et al., 1984). Genetically encoded hydrophobic amino acids include L-Pro (P), L-Ile (I), L-Phe (F), L-Val (V), L-Leu (L), L-Trp (W), L-Met (M), L-Ala (A) and L-Tyr (Y).

[0177] “Aromatic Amino Acid or Residue” refers to a hydrophilic or hydrophobic amino acid or residue having a side chain that includes at least one aromatic or heteroaromatic ring. Genetically encoded aromatic amino acids include L-Phe (F), L-Tyr (Y) and L-Trp (W). Although owing to the pKa of its heteroaromatic nitrogen atom L His (H) it is sometimes classified as a basic residue, or as an aromatic residue as its side chain includes a heteroaromatic ring, herein histidine is classified as a hydrophilic residue.

[0178] “Constrained amino acid or residue” refers to an amino acid or residue that has a constrained geometry. Herein, constrained residues include L-Pro (P) and L-His (H). Histidine has a constrained geometry because it has a relatively small imidazole ring. Proline has a constrained geometry because it also has a five membered ring.

[0179] “Non-polar Amino Acid or Residue” refers to a hydrophobic amino acid or residue having a side chain that is uncharged at physiological pH and which has bonds in which the pair of electrons shared in common by two atoms is generally held equally by each of the two atoms (i.e., the side chain is not polar). Genetically encoded non-polar amino acids include L-Gly (G), L-Leu (L), L-Val (V), L-Ile (I), L-Met (M) and L-Ala (A).

[0180] “Aliphatic Amino Acid or Residue” refers to a hydrophobic amino acid or residue having an aliphatic hydrocarbon side chain. Genetically encoded aliphatic amino acids include L-Ala (A), L-Val (V), L-Leu (L) and L-Ile (I).

[0181] “Small Amino Acid or Residue” refers to an amino acid or residue having a side chain that is composed of a total three or fewer carbon and/or heteroatoms (excluding the α-carbon and hydrogens). The small amino acids or residues may be further categorized as aliphatic, non-polar, polar or acidic small amino acids or residues, in accordance with the above definitions. Genetically-encoded small amino acids include L-Ala (A), L-Val (V), L-Cys (C), L-Asn (N), L-Ser (S), L-Thr (T) and L-Asp (D).

[0182] A “conservative” amino acid substitution (or mutation) refers to the substitution of a residue with a residue having a similar side chain, and thus typically involves substitution of the amino acid in the polypeptide with amino acids within the same or similar defined class of amino acids. For the following residues, the possible conservative mutations are provided in parentheses: A, L, V, I (Other aliphatic residues: A, L, V, 1); A, L, V, I, G, M (Other non-polar residues: A, L, V, I, G, M); D, E (Other acidic residues: D, E); K, R (Other basic residues: K, R); P, H (Other constrained residues: P, H); N, Q, S, T (Other polar residues: N, Q, S, T); Y, W, F (Other aromatic residues: Y, W, F); and C (none).

[0183] Phytocannabinoids are a large class of compounds with over 100 different known structures that are produced in the Cannabis plant. These bio-active molecules, such as tetrahydrocannabinol (THC) and cannabidiol (CBD), can be extracted from plant material for medical and psychotropic purposes. However, the synthesis of plant material is costly, not readily scalable to large volumes, and requires lengthy growth periods to produce sufficient quantities of phytocannabinoids. A fermentable organism such as Saccharomyces cerevisiae capable of producing cannabinoids would provide an economical route to producing these compounds on an industrial scale. The extensive time, energy, and labour involved in growing C. sativa for phytocannabinoid production provides a motivation to produce transgenic cell lines for production of phytocannabinoids in yeast. One example of such efforts is provided in PCT application by Mookerjee et al WO2018/148848.

[0184] FIG. 1 illustrates a cannabinoid biosynthesis pathway in Cannabis sativa. As expression and functionality of the C. sativa pathway in S. cerevisiae is hindered by problems of toxic precursors and poor expression, a novel biosynthetic route for cannabinoid production was developed that overcomes said issues.

[0185] The pathway is described in FIG. 2 comprises a multi-enzyme system. DiPKS from D. discoideum and OAC from C. sativa are used to produce olivetolic acid directly from glucose. GPP from the yeast terpenoid pathway and OLA are subsequently converted to cannabigerolic acid catalyzed by using a prenyltransferase. Then, C. sativa THCa synthase or CBDa synthase is used to further cyclize cannabigerolic acid to form THCa or CBDa respectively.

[0186] FIG. 2 illustrates a cannabinoid biosynthesis pathway as described in Applicant's co-pending PCT Application No. CA2020/050687 (Bourgeois et al., filed May 21, 2019), which is herein incorporated by reference.

[0187] The biosynthesis of downstream acid forms of phytocannabinoids in C. sativa from cannabigerolic acid (CBGa) is illustrated in steps 4 and 5 of FIG. 2. CBGa is oxidatively cyclized into A9-tetrahydrocannabinolic acid (THCa) by THCa synthase. As depicted herein, CBGa is oxidatively cyclized into cannabidiolic acid (CBDa) by CBDa synthase. PCT Application No: CA2020/050687 describes modified CBDa synthases, for example those referred to as Ostl-pro-alpha-f(I)-OXC52 and mutants thereof.

[0188] One mutant described in Applicant's co-pending PCT Application No. CA2020/050687 is referenced from strain HB2010, which is a mutant of OXC52 with a serine insertion between residues P224 and K225. Another mutant is from strain HB1973; a mutant of OXC52 having mutations S88A, L450G, and a serine insertion between residues 224 and 225, the sequence of which is provided in Applicant's co-pending International Patent Application PCT/CA2020/050687 and is hereby incorporated by reference. The protein is described as having the general description “Ostl-pro-alpha-f(I)-OXC52-Serine insertion between residues 224 and 225” is herein referred to interchangeably as “Ostl-pro-alpha-f(I)-OXC154”. Other variants pertaining to OXC52 are described in PCT Application No. CA2020/050687 such as variants referred to as “OXC155” and “OXC53”.

[0189] The term “CBDa synthase” refers to an oxidoreductase that converts CBGa into CBDa by stereo-selectively cyclizing the monoterpene moiety in CBGa, as shown in step 5 of FIG. 1. Wild type CBDa synthase isolated from Cannabis sativa (referred to herein as OXC52) has a protein sequence of 523 amino acids (or variants with 544 amino acids including an N-terminal signal peptide of 28 amino acids (Uniprot ID: A6P6V9). As referred to herein, the wild type CBDa synthase is encoded by the DNA sequence of SEQ ID NO:1. In yeast, proper CBDa synthase functionality requires localization to the vacuole. As described herein, when expressing CBDa synthases the native N-terminal signal peptide is removed from the enzyme and is replaced with an N-terminal Ostl-pro-alpha-f(I) tag (SEQ ID NO:156). All oxidocyclase sequences listed in this application have an added 3′-terminal 6 amino acid histidine tag (SEQ ID NO:206) to assist in protein purification where necessary.

[0190] CBDa synthase predominantly utilizes cannabigerolic acid (CBGa) as substrate to form CBDa, and also accepts cannabinerolic acid, an isomer of CBGa, with low catalytic activity. The oxidocyclization reaction catalyzed by CBDa synthase requires the FAD coenzyme but does not require molecular oxygen or other metal ion cofactors (Taura et al., 1996). The main reaction product is CBDa accompanied with a small amount of THCa and CBCa by-products.

[0191] A modified CBDa synthase is described herein that has a serine inserted between residues P224 and K225 of the wild type sequence and is hereafter referred to as OXC154 (encoded by a nucleotide according to SEQ ID NO:2), the amino acid sequence of which is provided as SEQ ID NO:141. In order to further improve the activity and product specificity of Ostl-pro-alpha-f(I)-OXC154 inside yeast, protein engineering was conducted on OXC154. Numerous variants were identified from the process displaying increased CBDa synthase activity and/or decreased THCa synthase activity. Sixty-eight such variants are exemplified herein. The variants described have at least one point mutation relative to the amino acid sequence of OXC154. The amino acid sequence illustrating candidate positions for modified residue locations is provided as SEQ ID NO:207.

[0192] The process of producing CBDa in a modified yeast cell using these enzymes is described herein.

[0193] Enzyme engineering is the process of improving a desired phenotype of the enzyme by making modifications to the amino acid sequence of the polypeptide. As the functionality of the enzyme is dependent on the structure of the enzyme and the structure of the enzyme is dependent, partially, on the primary amino acid sequence; modification of the amino acid sequence of the enzyme can lead to a beneficial impact on the desired phenotype. This principle was applied to OXC154, as described herein, and modifications were made to its amino acid sequence using a directed evolution approach, allowing identification of amino acid residues that improved activity in a strain of recombinant S. cerevisiae.

[0194] Sequences are described herein that have multiple residues modified as compared to the OXC154 sequence, which modifications allow the variant enzyme to catalyze the production of CBDa with greater demonstrated product conversion as compared to the OXC154. In some instances, improved product conversion may range up to 300% greater, for example more than 245% greater, more than 200% greater. Other levels of improvement are observed in different variants. Improvements to one or more enzyme properties of the engineered OXC154 variants may include increases in enzyme activity, enzyme kinetics and turnover, tolerance to increased levels of substrate, and tolerance to increased product levels. The modifications of the residues may be conservative modifications/substitutions or non-conservative modifications/substitutions.

[0195] According to embodiments described herein, the residues that can be modified will be defined as X{#} where # represents the sequence position in the amino acid position of the wild type OXC154 sequence (SEQ ID NO:2). Specifically the following 17 residues may be modified in the OXC154 variants according to SEQ ID NO:207: X{2}, X{3}, X{18}, X{21}, X{26}, X{47}, X{49}, X{60}, X{88}, X{97}, X{225}, X{295}, X{331}, X{347}, X{349}, X{351}, X{372}, X{383}, X{451}, among others.

[0196] Further, the following additional residues may be modified in this sequence: X{5}, X{28}, X{31}, X{274}, X{367}, X{399}, X{513}, X{515}.

[0197] SEQ ID NO:140 represents the wild type cannabidiolic acid (CBDa) synthase protein OXC52:

| | |
|---|---|
| MPRENFLKCF SQYIPNNATN LKLVYTQNNP LYMSVLNSTI HNLRFTSDTT | 50 |
| PKPLVIVTPS HVSHIQGTIL CSKKVGLQIR TRSGGHDSEG MSYISQVPFV | 100 |
| IVDLRNMRSI KIDVHSQTAW VEAGATLGEV YYWVNEKNEN LSLAAGYCPT | 150 |
| VCAGGHFGGG GYGPLMRNYG LAADNIIDAH LVNVHGKVLD RKSMGEDLFW | 200 |
| ALRGGGAESF GIIVAWKIRL VAVPKSTMFS VKKIMEIHEL VKLVNKWQNI | 250 |
| AYKYDKDLLL MTHFITRNIT DNQGKNKTAI HTYFSSVFLG GVDSLVDLMN | 300 |
| KSFPELGIKK TDCRQLSWID TIIFYSGVVN YDTDNFNKEI LLDRSAGQNG | 350 |
| AFKIKLDYVK KPIPESVFVQ ILEKLYEEDI GAGMYALYPY GGIMDEISES | 400 |
| AIPFPHRAGI LYELWYICSW EKQEDNEKHL NWIRNIYNFM TPYVSKNPRL | 450 |
| AYLNYRDLDI GINDPKNPNN YTQARIWGEK YFGKNFDRLV KVKTLVDPNN | 500 |
| FFRNEQSIPP LPRHRHGHHH HHH | 523 |

[0198] SEQ ID NO:141 represents the modified cannabidiolic acid (CBDa) synthase protein OXC154, which differs from OXC52 by having a serine S insertion between residues P224 and K225 relative to OXC52 (SEQ ID NO:140):

| | |
|---|---|
| MPRENFLKCF SQYIPNNATN LKLVYTQNNP LYMSVLNSTI HNLRFTSDTT | 50 |
| PKPLVIVTPS HVSHIQGTIL CSKKVGLQIR TRSGGHDSEG MSYISQVPFV | 100 |
| IVDLRNMRSI KIDVHSQTAW VEAGATLGEV YYWVNEKNEN LSLAAGYCPT | 150 |
| VCAGGHFGGG GYGPLMRNYG LAADNIIDAH LVNVHGKVLD RKSMGEDLFW | 200 |
| ALRGGGAESF GIIVAWKIRL VAVPSKSTMF SVKKIMEIHE LVKLVNKWQN | 250 |
| IAYKYDKDLL LMTHFITRNI TDNQGKNKTA IHTYFSSVFL GGVDSLVDLM | 300 |
| NKSFPELGIK KTDCRQLSWI DTIIFYSGVV NYDTDNFNKE ILLDRSAGQN | 350 |
| GAFKIKLDYV KKPIPESVFV QILEKLYEED IGAGMYALYP YGGIMDEISE | 400 |
| SAIPFPHRAG ILYELWYICS WEKQEDNEKHL NWIRNIYNF MTPYVSKNPR | 450 |
| LAYLNYRDLD IGINDPKNPN NYTQARIWGE KYFGKNFDRL VKVKTLVDPN | 500 |
| NFFRNEQSIP PLPRHRHGHH HHHH | 524 |

[0199] SEQ ID NO:207 represents the generalized variant CBDa synthase protein OXC154 of SEQ ID NO:141 (including the serine S insertion that is S225), but with candidate locations for mutated residues represented as X (where X represents any amino acid):

| | |
|---|---|
| MXXEXFLKCF SQYIPNNXTN XKLVYXQXNP XYMSVLNSTI HNLRFTXDXT | 50 |
| PKPLVIVTPX HVSHIQGTIL CSKKVGLQIR TRSGGHDXEG MSYISQXPFV | 100 |
| IVDLRNMRSI KIDVHSQTAW VEAGATLGEV YYWVNEKNEN LSLAAGYCPT | 150 |
| VCAGGHFGGG GYGPLMRNYG LAADNIIDAH LVNVHGKVLD RKSMGEDLFW | 200 |
| ALRGGGAESF GIIVAWKIRL VAVPXKSTMF SVKKIMEIHE LVKLVNXWQN | 250 |
| IAYKYDKDLL LMTHFITRNI TDNQGKNKTA IHTYFSSVFL GGVDSLVDLM | 300 |
| NKSFPELGIK KTDCRQLSWI DTIIFYSGVV XYDTDNFNKE ILLDRSXGXN | 350 |
| XAFKIKLDYV KKPIPEXVFV QXLEKLYEED IGXGMYALYP YGGIMDEIXE | 400 |
| SAIPFPHRAG ILYELWYICS WEKQEDNEKHL NWIRNIYNF MTPYVSKNPR | 450 |
| XAYLNYRDLD IGXNXPKNPN NYTQARIWGE KYFGKNFDRL VKVKTLVDPN | 500 |
| NFFRNEQSIP PLPRHRHGHH HHHH | 524 |

[0200] As described herein, the functionality of the OXC154 mutants were tested. This allowed for the rapid and robust identification of improvements to the catalytic conversion of CBDa or other products. The mutants were then tested combinatorially in vivo in S. cerevisiae to develop a consolidated cannabinoid producing strain.

### EXAMPLES

[0201] In overview, Examples 1 to 5 are provided.

[0202] Table 1-A shows a general screening data summary for Examples 1 to 4, designating mutagenesis technique used, library genetic manipulation, the OXC template in the Example, and the background strain.

TABLE 1-A
OXC Screening Data Summary for Examples

| Exam- | Mutagenesis | Library genetic | OXC | Background |
|---|---|---|---|---|
| ple | technique | manipulation | template | strain |
| 1 | Combinatorial | Cytosolic plasmid | OXC154 | HB965 |
| 2 | Combinatorial | Cytosolic plasmid | OXC161 | HB2191 |
| 3 | SSM* | Cytosolic plasmid | OXC158 | HB2652 |
| 4 | Combinatorial | Genome integration | OXC158 | HB3192 |

*SSM = Site-saturation mutagenesis

### Example 1

[0203] Combinatorial Set of OXC154 Mutants

[0204] Wild type cannabidiolic acid synthase (CBDa synthase or “OXC52” herein), when modified with the insertion of a serine between positions 224 and 225 in the OXC52 sequence, results in a new protein, referenced herein interchangeably as “OXC154”. This modified cannabidiolic acid synthase, OXC154, leads to significantly improved CBDa production as compared with OXC52. OXC154 is described in Applicant's co-pending application PCT/CA2020/050687, which is herein incorporated by reference. Variants of OXC154 are described herein that have increased CBDa synthase activity and/or decreased tetrahydrocannabinolic acid (THCa) synthase activity. In this example OXC154 enzyme and variants thereof are prepared.

[0205] Materials and Methods:

[0206] Genetic Manipulations:

[0207] Vector VB40 was used to construct all expression plasmids encoding enzyme proteins disclosed herein, including OXC154 and variants.

[0208] The expression plasmid encoding OXC154 was constructed by an in-house site-directed mutagenesis method, such that a serine was inserted between residues P224 and K225 relative to the wild type (OXC52) sequence (SEQ ID NO:140).

[0209] The OXC154 variants were constructed in a combinatorial library using mutations that were initially selected in a site-saturation mutagenesis library screen. The VB40 plasmid harboring OXC154 coding sequence (plasmid ID PLAS513) was used as the template in all library construction.

[0210] Site-saturation mutagenesis was conducted at each amino acid position by a PCR reaction using a forward degenerate NNK primer and a ‘back-to-back’ reverse non-mutagenic primer (FIG. 3). The PCR products were then processed through in vitro kinase-ligase-Dpnl reactions and transformed into Escherichia coli DH5alpha strain for amplification.

[0211] FIG. 3 illustrates PCR primers used in site-saturation mutagenesis protocol. Right-facing arrows represents forward degenerate NNK primer, symbol * denotes the mutational position, and the left-facing arrows represent a reverse primer designed ‘back-to-back’ in the opposite direction of the forward primer.

[0212] The combinatorial library was constructed by an in-house protocol. Selected mutations were combined through an overlap-extension PCR of a batch of mutagenic oligonucleotides that were generated using targeted mutagenic primers (FIG. 4). Double-stranded DNA of the assembled combinatorial mutant variants were cloned into a vector with complementary overlapping sequences, which resulted in a pool of OXC154 combinatorial variants. FIG. 4 shows an overlap-extension assembly of mutagenic oligonucleotides for combinatorial library construction. The symbol “x” represents a point mutation.

[0213] The plasmids encoding OXC154 and variant proteins as disclosed herein were transformed and expressed in Saccharomyces cerevisiae, with the host strain HB965. All DNA was transformed into background strains using the Gietz et al. transformation protocol (Gietz 2006).

[0214] Strain Growth and Media:

[0215] Strains were grown in yeast synthetic complete media with a composition of 1.7 g/L YNB without ammonium sulfate, 1.92 g/L URA dropout amino acid supplement, 1.5 g/L magnesium L-glutamate, with 2% w/v galactose, 2% w/v raffinose, 200 μg/L geneticin, and 200 μg/L ampicillin (Sigma-Aldrich Canada). The culture was incubated at 30° C. for four days (96 hours). Strain HB2010 and HB1741 were respectively used as wild type control and negative control in the screening of OXC154 variants with improved activity.

[0216] Variant Screening Conditions:

[0217] Each variant was tested in three replicates and each replicate was clonally derived from single colonies. All strains were grown in 500 μL of media for 96 hours in 96-well deepwell plates. The 96-well deepwell plates were incubated at 30° C. and shaken at 950 rpm for 96 hrs.

[0218] Metabolite extraction was performed by adding 30 μL of culture to 270 μL of 56% acetonitrile in a 96-well microtiter plate. The solutions were mixed thoroughly, then centrifuged at 3750 rpm for 10 mins. 200 μL of the soluble layer was removed and stored in a 96-well v-bottom microtiter plate. Samples were stored at −20° C. until analysis.

[0219] Quantification Protocol:

[0220] The quantification of metabolites was performed using HPLC-MS on a Acquity UPLC-TQD MS. The chromatography and MS conditions are described below.

[0221] LC Conditions

[0222] Column: ACQUITY HSS C18 UPLC 50×1 mm, 1.8 μm particle size (PN:186003529); Column temperature: 45° C.; Flow rate: 0.350 mL/min; Eluent A: Water+0.1% Formic Acid; Eluent B: ACN+0.1% Formic Acid; Gradient is shown in Table 1-B.

TABLE 1-B
Gradient

| Time (min) | % B | Flow rate (mL/min) |
|---|---|---|
| 0 | 20 | 0.350 |
| 0.60 | 98 | 0.350 |
| 1.10 | 98 | 0.350 |
| 1.11 | 20 | 0.350 |
| 1.60 | 20 | 0.350 |

[0223] ESI-MS Conditions

[0224] The following conditions were utilized: Capillary: 2.90 (kV); Source temperature: 150° C.; Desolvation gas temperature: 250° C.; Desolvation gas flow (nitrogen): 500 L/hour; Cone gas flow (nitrogen): 1 L/hour; Collision gas flow (argon): 0.10 mL/min. Detection parameters are shown in Table 2.

TABLE 2
Detection Parameters

| | OVLa | OVL | CBGa | CBDa | THCa |
|---|---|---|---|---|---|
| Retention time (min) | 0.70 | 0.72 | 0.98 | 0.98 | 1.12 |
| Parent (m/z) | 223.0 | 181.1 | 359.2 | 357.2 | 357.2 |
| Daughter (m/z) | 179.0 | 71.0 | 341.2 | 245.2 | 313.2 |
| Mode | ES−, MRM | ES+, MRM | ES−, MRM | ES−, MRM | ES−, MRM |
| Cone (V) | 35 | 20 | 40 | 45 | 45 |
| Collision (V) | 20 | 12 | 25 | 35 | 30 |

[0225] Strains used are described in Table 3.

TABLE 3
Strains Used

| Strain # | Background | Plasmids | Genotype | Notes |
|---|---|---|---|---|
| HB42 | -URA, -LEU | None | Saccharomyces cerevisiae | Base strain |
| | | | CEN.PK2; ΔLEU2; ΔURA3; Erg20K197E::KanMx | |
| HB965 | -URA, -LEU | None | Saccharomyces cerevisiae | Base strain |
| | | | CEN.PK2; ΔLEU2; ΔURA3; Erg20K197E::KanMx; ALD6; | |
| | | | ASC1L641P; NPGA; MAF1; PGK1p: Acc1; tHMGR1; IDI; | |
| | | | DiPKS_G1516R X 5; ACC1_S659A_S1157A; UBI4p: | |
| | | | ERG20; pGAL: OAC; pGAL: PT254 | |
| HB1741 | -URA, -LEU | PLAS416 | Saccharomyces cerevisiae | RFP |
| | | | CEN.PK2; ΔLEU2; ΔURA3; Erg20K197E::KanMx; ALD6; | mScarlet |
| | | | ASC1L641P; NPGA; MAF1; PGK1p: Acc1; tHMGR1; IDI; | |
| | | | DiPKS_G1516R X 5; ACC1_S659A_S1157A; UBI4p: | |
| | | | ERG20; pGAL: OAC; pGAL: PT254 | |
| HB2010 | -URA, -LEU | PLAS513 | Saccharomyces cerevisiae | OXC154 |
| | | | CEN.PK2; ΔLEU2; ΔURA3; Erg20K197E::KanMx; ALD6; | |
| | | | ASC1L641P; NPGA; MAF1; PGK1p: Acc1; tHMGR1; IDI; | |
| | | | DiPKS_G1516R X 5; ACC1_S659A_S1157A; UBI4p: | |
| | | | ERG20; pGAL: OAC; pGAL: PT254; | |
| HB1973 | -URA, -LEU | PLAS462 | Saccharomyces cerevisiae | OXC154- |
| | | | CEN.PK2; ΔLEU2; ΔURA3; Erg20K197E::KanMx; ALD6; | S88A/L451G |
| | | | ASC1L641P; NPGA; MAF1; PGK1p: Acc1; tHMGR1; IDI; | |
| | | | DiPKS_G1516R X 5; ACC1_S659A_S1157A; UBI4p: | |
| | | | ERG20; pGAL: OAC; pGAL: PT254; | |
| PLT1504-H11 | -URA, -LEU | PLAS-564 | Saccharomyces cerevisiae | OXC154-R3G(=GGG)/ |
| | | | CEN.PK2; ΔLEU2; ΔURA3; Erg20K197E::KanMx; ALD6; | L21G/S60T/S88A(=GCT) |
| | | | ASC1L641P; NPGA; MAF1; PGK1p: Acc1; tHMGR1; IDI; | |
| | | | DiPKS_G1516R X 5; ACC1_S659A_S1157A; UBI4p: | |
| | | | ERG20; pGAL: OAC; pGAL: PT254 | |
| PLT1504-C8 | -URA, -LEU | PLAS-565 | Saccharomyces cerevisiae | OXC154-R3G(=GGG)/ |
| | | | CEN.PK2; ΔLEU2; ΔURA3; Erg20K197E::KanMx; ALD6; | A18E/T49R/S60T/ |
| | | | ASC1L641P; NPGA; MAF1; PGK1p: Acc1; tHMGR1; IDI; | S88A(=GCT) |
| | | | DiPKS_G1516R X 5; ACC1_S659A_S1157A; UBI4p: | |
| | | | ERG20; pGAL: OAC; pGAL: PT254 | |
| PLT1504-F12 | -URA, -LEU | PLAS-566 | Saccharomyces cerevisiae | OXC154-R3T/ |
| | | | CEN.PK2; ΔLEU2; ΔURA3; Erg20K197E::KanMx; ALD6; | T49R/S88A(=GCC) |
| | | | ASC1L641P; NPGA; MAF1; PGK1p: Acc1; tHMGR1; IDI; | |
| | | | DiPKS_G1516R X 5; ACC1_S659A_S1157A; UBI4p: | |
| | | | ERG20; pGAL: OAC; pGAL: PT254 | |
| PLT1505-D11 | -URA, -LEU | PLAS-567 | Saccharomyces cerevisiae | OXC154-R3W/ |
| | | | CEN.PK2; ΔLEU2; ΔURA3; Erg20K197E::KanMx; ALD6; | A18E/T49R/S60T/ |
| | | | ASC1L641P; NPGA; MAF1; PGK1p: Acc1; tHMGR1; IDI; | S88A(=GCT) |
| | | | DiPKS_G1516R X 5; ACC1_S659A_S1157A; UBI4p: | |
| | | | ERG20; pGAL: OAC; pGAL: PT254 | |
| PLT1505-C9 | -URA, -LEU | PLAS-568 | Saccharomyces cerevisiae | OXC154-R3V/ |
| | | | CEN.PK2; ΔLEU2; ΔURA3; Erg20K197E::KanMx; ALD6; | T49R/S60T/S88A |
| | | | ASC1L641P; NPGA; MAF1; PGK1p: Acc1; tHMGR1; IDI; | (=GCT) |
| | | | DiPKS_G1516R X 5; ACC1_S659A_S1157A; UBI4p: | |
| | | | ERG20; pGAL: OAC; pGAL: PT254 | |
| PLT1505-H5 | -URA, -LEU | PLAS-569 | Saccharomyces cerevisiae | OXC154-R3V/ |
| | | | CEN.PK2; ΔLEU2; ΔURA3; Erg20K197E::KanMx; ALD6; | T49R/S60T/S88A |
| | | | ASC1L641P; NPGA; MAF1; PGK1p: Acc1; tHMGR1; IDI; | (=GCC) |
| | | | DiPKS_G1516R X 5; ACC1_S659A_S1157A; UBI4p: | |
| | | | ERG20; pGAL: OAC; pGAL: PT254 | |
| PLT1504-G7 | -URA, -LEU | PLAS-570 | Saccharomyces cerevisiae | OXC154- |
| | | | CEN.PK2; ΔLEU2; ΔURA3; Erg20K197E::KanMx; ALD6; | A18A(=GCC) |
| | | | ASC1L641P; NPGA; MAF1; PGK1p: Acc1; tHMGR1; IDI; | |
| | | | DiPKS_G1516R X 5; ACC1_S659A_S1157A; UBI4p: | |
| | | | ERG20; pGAL: OAC; pGAL: PT254 | |
| PLT1504-E3 | -URA, -LEU | PLAS-571 | Saccharomyces cerevisiae | OXC154-R3T/ |
| | | | CEN.PK2; ΔLEU2; ΔURA3; Erg20K197E::KanMx; ALD6; | A18E/T49R/ |
| | | | ASC1L641P; NPGA; MAF1; PGK1p: Acc1; tHMGR1; IDI; | S88A(=GCC) |
| | | | DiPKS_G1516R X 5; ACC1_S659A_S1157A; UBI4p: | |
| | | | ERG20; pGAL: OAC; pGAL: PT254 | |
| PLT1505-B8 | -URA, -LEU | PLAS-572 | Saccharomyces cerevisiae | OXC154-R3T/ |
| | | | CEN.PK2; ΔLEU2; ΔURA3; Erg20K197E::KanMx; ALD6; | S88A(=GCC) |
| | | | ASC1L641P; NPGA; MAF1; PGK1p: Acc1; tHMGR1; IDI; | |
| | | | DiPKS_G1516R X 5; ACC1_S659A_S1157A; UBI4p: | |
| | | | ERG20; pGAL: OAC; pGAL: PT254 | |
| PLT1505-B9 | -URA, -LEU | PLAS-573 | Saccharomyces cerevisiae | OXC154- |
| | | | CEN.PK2; ΔLEU2; ΔURA3; Erg20K197E::KanMx; ALD6; | R3G(=GGG)/ |
| | | | ASC1L641P; NPGA; MAF1; PGK1p: Acc1; tHMGR1; IDI; | L21G/T49R |
| | | | DiPKS_G1516R X 5; ACC1_S659A_S1157A; UBI4p: | |
| | | | ERG20; pGAL: OAC; pGAL: PT254 | |
| PLT1504-C11 | -URA, -LEU | PLAS-574 | Saccharomyces cerevisiae | OXC154-R3T/ |
| | | | CEN.PK2; ΔLEU2; ΔURA3; Erg20K197E::KanMx; ALD6; | T49R/ |
| | | | ASC1L641P; NPGA; MAF1; PGK1p: Acc1; tHMGR1; IDI; | S88A(=GCT) |
| | | | DiPKS_G1516R X 5; ACC1_S659A_S1157A; UBI4p: | |
| | | | ERG20; pGAL: OAC; pGAL: PT254 | |
| PLT1504-F5 | -URA, -LEU | PLAS-575 | Saccharomyces cerevisiae | OXC154- |
| | | | CEN.PK2; ΔLEU2; ΔURA3; Erg20K197E::KanMx; ALD6; | R3G(=GGA)/ |
| | | | ASC1L641P; NPGA; MAF1; PGK1p: Acc1; tHMGR1; IDI; | A18E/T49R/ |
| | | | DiPKS_G1516R X 5; ACC1_S659A_S1157A; UBI4p: | S60T/ |
| | | | ERG20; pGAL: OAC; pGAL: PT254 | S88A(=GCC) |
| PLT1506-C5 | -URA, -LEU | PLAS-576 | Saccharomyces cerevisiae | OXC154-R3W/ |
| | | | CEN.PK2; ΔLEU2; ΔURA3; Erg20K197E::KanMx; ALD6; | T49R/ |
| | | | ASC1L641P; NPGA; MAF1; PGK1p: Acc1; tHMGR1; IDI; | S88A(=GCC)/ |
| | | | DiPKS_G1516R X 5; ACC1_S659A_S1157A; UBI4p: | V97E |
| | | | ERG20; pGAL: OAC; pGAL: PT254 | |
| PLT1505-F12 | -URA, -LEU | PLAS-577 | Saccharomyces cerevisiae | OXC154- |
| | | | CEN.PK2; ΔLEU2; ΔURA3; Erg20K197E::KanMx; ALD6; | R3G(=GGG)/ |
| | | | ASC1L641P; NPGA; MAF1; PGK1p: Acc1; tHMGR1; IDI; | A18E/ |
| | | | DiPKS_G1516R X 5; ACC1_S659A_S1157A; UBI4p: | S88A(=GCC) |
| | | | ERG20; pGAL: OAC; pGAL: PT254 | |
| PLT1504-D6 | -URA, -LEU | PLAS-578 | Saccharomyces cerevisiae | OXC154- |
| | | | CEN.PK2; ΔLEU2; ΔURA3; Erg20K197E::KanMx; ALD6; | R3V/A18E/ |
| | | | ASC1L641P; NPGA; MAF1; PGK1p: Acc1; tHMGR1; IDI; | T49R/S60T/ |
| | | | DiPKS_G1516R X 5; ACC1_S659A_S1157A; UBI4p: | S88A(=GCC) |
| | | | ERG20; pGAL: OAC; pGAL: PT254 | |
| PLT1504-A2 | -URA, -LEU | PLAS-579 | Saccharomyces cerevisiae | OXC154- |
| | | | CEN.PK2; ΔLEU2; ΔURA3; Erg20K197E::KanMx; ALD6; | S60T/S88A |
| | | | ASC1L641P; NPGA; MAF1; PGK1p: Acc1; tHMGR1; IDI; | (=GCC) |
| | | | DiPKS_G1516R X 5; ACC1_S659A_S1157A; UBI4p: | |
| | | | ERG20; pGAL: OAC; pGAL: PT254 | |
| PLT1505-E11 | -URA, -LEU | PLAS-580 | Saccharomyces cerevisiae | OXC154- |
| | | | CEN.PK2; ΔLEU2; ΔURA3; Erg20K197E::KanMx; ALD6; | R3T/A18E/ |
| | | | ASC1L641P; NPGA; MAF1; PGK1p: Acc1; tHMGR1; IDI; | T49R/S60T/ |
| | | | DiPKS_G1516R X 5; ACC1_S659A_S1157A; UBI4p: | S88A(=GCT) |
| | | | ERG20; pGAL: OAC; pGAL: PT254 | |
| PLT1505-F9 | -URA, -LEU | PLAS-581 | Saccharomyces cerevisiae | OXC154- R3W/ |
| | | | CEN.PK2; ΔLEU2; ΔURA3; Erg20K197E::KanMx; ALD6; | L21G/T49R/ |
| | | | ASC1L641P; NPGA; MAF1; PGK1p: Acc1; tHMGR1; IDI; | S88A(=GCC)/ |
| | | | DiPKS_G1516R X 5; ACC1_S659A_S1157A; UBI4p: | V97E |
| | | | ERG20; pGAL: OAC; pGAL: PT254 | |
| PLT1506-A2 | -URA, -LEU | PLAS-582 | Saccharomyces cerevisiae | OXC154- |
| | | | CEN.PK2; ΔLEU2; ΔURA3; Erg20K197E::KanMx; ALD6; | R3T/A18E/ |
| | | | ASC1L641P; NPGA; MAF1; PGK1p: Acc1; tHMGR1; IDI; | T49R/S60T |
| | | | DiPKS_G1516R X 5; ACC1_S659A_S1157A; UBI4p: | |
| | | | ERG20; pGAL: OAC; pGAL: PT254 | |
| PLT1504-D12 | -URA, -LEU | PLAS-583 | Saccharomyces cerevisiae | OXC154- |
| | | | CEN.PK2; ΔLEU2; ΔURA3; Erg20K197E::KanMx; ALD6; | P2W/T26A/ |
| | | | ASC1L641P; NPGA; MAF1; PGK1p: Acc1; tHMGR1; IDI; | S60T |
| | | | DiPKS_G1516R X 5; ACC1_S659A_S1157A; UBI4p: | |
| | | | ERG20; pGAL: OAC; pGAL: PT254 | |
| PLT1505-B11 | -URA, -LEU | PLAS-584 | Saccharomyces cerevisiae | OXC154- |
| | | | CEN.PK2; ΔLEU2; ΔURA3; Erg20K197E::KanMx; ALD6; | R3G(=GGG)/ |
| | | | ASC1L641P; NPGA; MAF1; PGK1p: Acc1; tHMGR1; IDI; | L21G/S60T/ |
| | | | DiPKS_G1516R X 5; ACC1_S659A_S1157A; UBI4p: | S88A(=GCC)/ |
| | | | ERG20; pGAL: OAC; pGAL: PT254 | V97E |
| PLT1505-G11 | -URA, -LEU | PLAS-585 | Saccharomyces cerevisiae | OXC154- |
| | | | CEN.PK2; ΔLEU2; ΔURA3; Erg20K197E::KanMx; ALD6; | R3G(=GGG)/ |
| | | | ASC1L641P; NPGA; MAF1; PGK1p: Acc1; tHMGR1; IDI; | A18E/T49R/ |
| | | | DiPKS_G1516R X 5; ACC1_S659A_S1157A; UBI4p: | S88A(=GCC) |
| | | | ERG20; pGAL: OAC; pGAL: PT254 | |
| PLT1506-A10 | -URA, -LEU | PLAS-586 | Saccharomyces cerevisiae | OXC154- |
| | | | CEN.PK2; ΔLEU2; ΔURA3; Erg20K197E::KanMx; ALD6; | R3T/L21G/ |
| | | | ASC1L641P; NPGA; MAF1; PGK1p: Acc1; tHMGR1; IDI; | S60T/S88A |
| | | | DiPKS_G1516R X 5; ACC1_S659A_S1157A; UBI4p: | (=GCC)/ |
| | | | ERG20; pGAL: OAC; pGAL: PT254 | V97D |
| PLT1505-H3 | -URA, -LEU | PLAS-587 | Saccharomyces cerevisiae | OXC154- P2W/ |
| | | | CEN.PK2; ΔLEU2; ΔURA3; Erg20K197E::KanMx; ALD6; | L21G/T49R/ |
| | | | ASC1L641P; NPGA; MAF1; PGK1p: Acc1; tHMGR1; IDI; | S88A(=GCC)/ |
| | | | DiPKS_G1516R X 5; ACC1_S659A_S1157A; UBI4p: | V97E |
| | | | ERG20; pGAL: OAC; pGAL: PT254 | |
| PLT1505-H2 | -URA, -LEU | PLAS-588 | Saccharomyces cerevisiae | OXC154- |
| | | | CEN.PK2; ΔLEU2; ΔURA3; Erg20K197E::KanMx; ALD6; | R3G(=GGG)/ |
| | | | ASC1L641P; NPGA; MAF1; PGK1p: Acc1; tHMGR1; IDI; | L21G/T49R/ |
| | | | DiPKS_G1516R X 5; ACC1_S659A_S1157A; UBI4p: | S88A(=GCT) |
| | | | ERG20; pGAL: OAC; pGAL: PT254 | |
| PLT1506-C4 | -URA, -LEU | PLAS-589 | Saccharomyces cerevisiae | OXC154- |
| | | | CEN.PK2; ΔLEU2; ΔURA3; Erg20K197E::KanMx; ALD6; | S295S(=TCA) |
| | | | ASC1L641P; NPGA; MAF1; PGK1p: Acc1; tHMGR1; IDI; | |
| | | | DiPKS_G1516R X 5; ACC1_S659A_S1157A; UBI4p: | |
| | | | ERG20; pGAL: OAC; pGAL: PT254 | |
| PLT1506-A8 | -URA, -LEU | PLAS-590 | Saccharomyces cerevisiae | OXC154- |
| | | | CEN.PK2; ΔLEU2; ΔURA3; Erg20K197E::KanMx; ALD6; | R3V/L21G/ |
| | | | ASC1L641P; NPGA; MAF1; PGK1p: Acc1; tHMGR1; IDI; | S60T/S88A |
| | | | DiPKS_G1516R X 5; ACC1_S659A_S1157A; UBI4p: | (=GCC) |
| | | | ERG20; pGAL: OAC; pGAL: PT254 | |
| PLT1505-F2 | -URA, -LEU | PLAS-591 | Saccharomyces cerevisiae | OXC154- |
| | | | CEN.PK2; ΔLEU2; ΔURA3; Erg20K197E::KanMx; ALD6; | R3T/A18E/ |
| | | | ASC1L641P; NPGA; MAF1; PGK1p: Acc1; tHMGR1; IDI; | S88A(=GCC) |
| | | | DiPKS_G1516R X 5; ACC1_S659A_S1157A; UBI4p: | |
| | | | ERG20; pGAL: OAC; pGAL: PT254 | |
| PLT1504-E2 | -URA, -LEU | PLAS-592 | Saccharomyces cerevisiae | OXC154- |
| | | | CEN.PK2; ΔLEU2; ΔURA3; Erg20K197E::KanMx; ALD6; | S60T/S88A |
| | | | ASC1L641P; NPGA; MAF1; PGK1p: Acc1; tHMGR1; IDI; | (=GCT) |
| | | | DiPKS_G1516R X 5; ACC1_S659A_S1157A; UBI4p: | |
| | | | ERG20; pGAL: OAC; pGAL: PT254 | |
| PLT1506-H2 | -URA, -LEU | PLAS-593 | Saccharomyces cerevisiae | OXC154- |
| | | | CEN.PK2; ΔLEU2; ΔURA3; Erg20K197E::KanMx; ALD6; | R3W/T49R/ |
| | | | ASC1L641P; NPGA; MAF1; PGK1p: Acc1; tHMGR1; IDI; | S88A(=GCT) |
| | | | DiPKS_G1516R X 5; ACC1_S659A_S1157A; UBI4p: | |
| | | | ERG20; pGAL: OAC; pGAL: PT254 | |
| PLT1505-A6 | -URA, -LEU | PLAS-594 | Saccharomyces cerevisiae | OXC154-T49R/ |
| | | | CEN.PK2; ΔLEU2; ΔURA3; Erg20K197E::KanMx; ALD6; | S88A(=GCC) |
| | | | ASC1L641P; NPGA; MAF1; PGK1p: Acc1; tHMGR1; IDI; | |
| | | | DiPKS_G1516R X 5; ACC1_S659A_S1157A; UBI4p: | |
| | | | ERG20; pGAL: OAC; pGAL: PT254 | |
| PLT1506-F10 | -URA, -LEU | PLAS-595 | Saccharomyces cerevisiae | OXC154- |
| | | | CEN.PK2; ΔLEU2; ΔURA3; Erg20K197E::KanMx; ALD6; | R3W/S47F |
| | | | ASC1L641P; NPGA; MAF1; PGK1p: Acc1; tHMGR1; IDI; | |
| | | | DiPKS_G1516R X 5; ACC1_S659A_S1157A; UBI4p: | |
| | | | ERG20; pGAL: OAC; pGAL: PT254 | |
| PLT1508-H10 | -URA, -LEU | PLAS-596 | Saccharomyces cerevisiae | OXC154- |
| | | | CEN.PK2; ΔLEU2; ΔURA3; Erg20K197E::KanMx; ALD6; | A347G/I372L/ |
| | | | ASC1L641P; NPGA; MAF1; PGK1p: Acc1; tHMGR1; IDI; | L451G |
| | | | DiPKS_G1516R X 5; ACC1_S659A_S1157A; UBI4p: | |
| | | | ERG20; pGAL: OAC; pGAL: PT254 | |
| PLT1505-E9 | -URA, -LEU | PLAS-597 | Saccharomyces cerevisiae | OXC154- |
| | | | CEN.PK2; ΔLEU2; ΔURA3; Erg20K197E::KanMx; ALD6; | R3G(=GGG)/ |
| | | | ASC1L641P; NPGA; MAF1; PGK1p: Acc1; tHMGR1; IDI; | L21G/S60T |
| | | | DiPKS_G1516R X 5; ACC1_S659A_S1157A; UBI4p: | |
| | | | ERG20; pGAL: OAC; pGAL: PT254 | |
| PLT1506-C10 | -URA, -LEU | PLAS-598 | Saccharomyces cerevisiae | OXC154- |
| | | | CEN.PK2; ΔLEU2; ΔURA3; Erg20K197E::KanMx; ALD6; | R3T/L21G/ |
| | | | ASC1L641P; NPGA; MAF1; PGK1p: Acc1; tHMGR1; IDI; | T49R/ |
| | | | DiPKS_G1516R X 5; ACC1_S659A_S1157A; UBI4p: | S88A(=GCT) |
| | | | ERG20; pGAL: OAC; pGAL: PT254 | |
| PLT1506-C4 | -URA, -LEU | PLAS-599 | Saccharomyces cerevisiae | OXC154- |
| | | | CEN.PK2; ΔLEU2; ΔURA3; Erg20K197E::KanMx; ALD6; | R3T/L21G/ |
| | | | ASC1L641P; NPGA; MAF1; PGK1p: Acc1; tHMGR1; IDI; | S60T |
| | | | DiPKS_G1516R X 5; ACC1_S659A_S1157A; UBI4p: | |
| | | | ERG20; pGAL: OAC; pGAL: PT254 | |
| PLT1506-A3 | -URA, -LEU | PLAS-600 | Saccharomyces cerevisiae | OXC154-R3W/ |
| | | | CEN.PK2; ΔLEU2; ΔURA3; Erg20K197E::KanMx; ALD6; | L21G/ |
| | | | ASC1L641P; NPGA; MAF1; PGK1p: Acc1; tHMGR1; IDI; | S88A(=GCT) |
| | | | DiPKS_G1516R X 5; ACC1_S659A_S1157A; UBI4p: | |
| | | | ERG20; pGAL: OAC; pGAL: PT254 | |
| PLT1506-D11 | -URA, -LEU | PLAS-601 | Saccharomyces cerevisiae | OXC154- |
| | | | CEN.PK2; ΔLEU2; ΔURA3; Erg20K197E::KanMx; ALD6; | L21G/T49R/ |
| | | | ASC1L641P; NPGA; MAF1; PGK1p: Acc1; tHMGR1; IDI; | S60T/S88A(=GCT) |
| | | | DiPKS_G1516R X 5; ACC1_S659A_S1157A; UBI4p: | |
| | | | ERG20; pGAL: OAC; pGAL: PT254 | |
| PLT1507-B11 | -URA, -LEU | PLAS-602 | Saccharomyces cerevisiae | OXC154- |
| | | | CEN.PK2; ΔLEU2; ΔURA3; Erg20K197E::KanMx; ALD6; | A347G/A383V |
| | | | ASC1L641P; NPGA; MAF1; PGK1p: Acc1; tHMGR1; IDI; | |
| | | | DiPKS_G1516R X 5; ACC1_S659A_S1157A; UBI4p: | |
| | | | ERG20; pGAL: OAC; pGAL: PT254 | |
| PLT1505-A9 | -URA, -LEU | PLAS-603 | Saccharomyces cerevisiae | OXC154- |
| | | | CEN.PK2; ΔLEU2; ΔURA3; Erg20K197E::KanMx; ALD6; | R3W/L21G/ |
| | | | ASC1L641P; NPGA; MAF1; PGK1p: Acc1; tHMGR1; IDI; | T49R/S60T/ |
| | | | DiPKS_G1516R X 5; ACC1_S659A_S1157A; UBI4p: | S88A(=GCT) |
| | | | ERG20; pGAL: OAC; pGAL: PT254 | |
| PLT1505-E12 | -URA, -LEU | PLAS-604 | Saccharomyces cerevisiae | OXC154- |
| | | | CEN.PK2; ΔLEU2; ΔURA3; Erg20K197E::KanMx; ALD6; | A18E/ |
| | | | ASC1L641P; NPGA; MAF1; PGK1p: Acc1; tHMGR1; IDI; | S88A(=GCC) |
| | | | DiPKS_G1516R X 5; ACC1_S659A_S1157A; UBI4p: | |
| | | | ERG20; pGAL: OAC; pGAL: PT254 | |
| PLT1506-H9 | -URA, -LEU | PLAS-605 | Saccharomyces cerevisiae | OXC154- |
| | | | CEN.PK2; ΔLEU2; ΔURA3; Erg20K197E::KanMx; ALD6; | R3W/L21G/ |
| | | | ASC1L641P; NPGA; MAF1; PGK1p: Acc1; tHMGR1; IDI; | T49R |
| | | | DiPKS_G1516R X 5; ACC1_S659A_S1157A; UBI4p: | |
| | | | ERG20; pGAL: OAC; pGAL: PT254 | |
| PLT1508-E1 | -URA, -LEU | PLAS-606 | Saccharomyces cerevisiae | OXC154- |
| | | | CEN.PK2; ΔLEU2; ΔURA3; Erg20K197E::KanMx; ALD6; | A347G/L451G |
| | | | ASC1L641P; NPGA; MAF1; PGK1p: Acc1; tHMGR1; IDI; | |
| | | | DiPKS_G1516R X 5; ACC1_S659A_S1157A; UBI4p: | |
| | | | ERG20; pGAL: OAC; pGAL: PT254 | |
| PLT1507-F10 | -URA, -LEU | PLAS-607 | Saccharomyces cerevisiae | OXC154- |
| | | | CEN.PK2; ΔLEU2; ΔURA3; Erg20K197E::KanMx; ALD6; | A347G/I372L/ |
| | | | ASC1L641P; NPGA; MAF1; PGK1p: Acc1; tHMGR1; IDI; | A383V/ |
| | | | DiPKS_G1516R X 5; ACC1_S659A_S1157A; UBI4p: | L451G |
| | | | ERG20; pGAL: OAC; pGAL: PT254 | |
| PLT1508-F7 | -URA, -LEU | PLAS-608 | Saccharomyces cerevisiae | OXC154- |
| | | | CEN.PK2; ΔLEU2; ΔURA3; Erg20K197E::KanMx; ALD6; | I372L/A383V/ |
| | | | ASC1L641P; NPGA; MAF1; PGK1p: Acc1; tHMGR1; IDI; | L451G |
| | | | DiPKS_G1516R X 5; ACC1_S659A_S1157A; UBI4p: | |
| | | | ERG20; pGAL: OAC; pGAL: PT254 | |
| PLT1506-A11 | -URA, -LEU | PLAS-609 | Saccharomyces cerevisiae | OXC154- |
| | | | CEN.PK2; ΔLEU2; ΔURA3; Erg20K197E::KanMx; ALD6; | R3V/T49R/ |
| | | | ASC1L641P; NPGA; MAF1; PGK1p: Acc1; tHMGR1; IDI; | S88A(=GCT) |
| | | | DiPKS_G1516R X 5; ACC1_S659A_S1157A; UBI4p: | |
| | | | ERG20; pGAL: OAC; pGAL: PT254 | |
| PLT1504-E5 | -URA, -LEU | PLAS-610 | Saccharomyces cerevisiae | OXC154- |
| | | | CEN.PK2; ΔLEU2; ΔURA3; Erg20K197E::KanMx; ALD6; | R3G(=GGG)/ |
| | | | ASC1L641P; NPGA; MAF1; PGK1p: Acc1; tHMGR1; IDI; | A18E/S60T |
| | | | DiPKS_G1516R X 5; ACC1_S659A_S1157A; UBI4p: | |
| | | | ERG20; pGAL: OAC; pGAL: PT254 | |
| PLT1508-D10 | -URA, -LEU | PLAS-611 | Saccharomyces cerevisiae | OXC154- |
| | | | CEN.PK2; ΔLEU2; ΔURA3; Erg20K197E::KanMx; ALD6; | A347G/I372L/ |
| | | | ASC1L641P; NPGA; MAF1; PGK1p: Acc1; tHMGR1; IDI; | A383V |
| | | | DiPKS_G1516R X 5; ACC1_S659A_S1157A; UBI4p: | |
| | | | ERG20; pGAL: OAC; pGAL: PT254 | |
| PLT1505-B2 | -URA, -LEU | PLAS-612 | Saccharomyces cerevisiae | OXC154- |
| | | | CEN.PK2; ΔLEU2; ΔURA3; Erg20K197E::KanMx; ALD6; | R3T |
| | | | ASC1L641P; NPGA; MAF1; PGK1p: Acc1; tHMGR1; IDI; | |
| | | | DiPKS_G1516R X 5; ACC1_S659A_S1157A; UBI4p: | |
| | | | ERG20; pGAL: OAC; pGAL: PT254 | |
| PLT1505-G1 | -URA, -LEU | PLAS-613 | Saccharomyces cerevisiae | OXC154- |
| | | | CEN.PK2; ΔLEU2; ΔURA3; Erg20K197E::KanMx; ALD6; | R3V/A18E/ |
| | | | ASC1L641P; NPGA; MAF1; PGK1p: Acc1; tHMGR1; IDI; | T49R/V97E |
| | | | DiPKS_G1516R X 5; ACC1_S659A_S1157A; UBI4p: | |
| | | | ERG20; pGAL: OAC; pGAL: PT254 | |
| PLT1505-G3 | -URA, -LEU | PLAS-614 | Saccharomyces cerevisiae | OXC154- |
| | | | CEN.PK2; ΔLEU2; ΔURA3; Erg20K197E::KanMx; ALD6; | R3T/L21G/ |
| | | | ASC1L641P; NPGA; MAF1; PGK1p: Acc1; tHMGR1; IDI; | T49R/S60T/ |
| | | | DiPKS_G1516R X 5; ACC1_S659A_S1157A; UBI4p: | S88A(=GCT) |
| | | | ERG20; pGAL: OAC; pGAL: PT254 | |
| PLT1504-F6 | -URA, -LEU | PLAS-615 | Saccharomyces cerevisiae | OXC154- |
| | | | CEN.PK2; ΔLEU2; ΔURA3; Erg20K197E::KanMx; ALD6; | R3T/L21G/ |
| | | | ASC1L641P; NPGA; MAF1; PGK1p: Acc1; tHMGR1; IDI; | T49R/V97E |
| | | | DiPKS_G1516R X 5; ACC1_S659A_S1157A; UBI4p: | |
| | | | ERG20; pGAL: OAC; pGAL: PT254 | |
| PLT1505-E3 | -URA, -LEU | PLAS-616 | Saccharomyces cerevisiae | OXC154- |
| | | | CEN.PK2; ΔLEU2; ΔURA3; Erg20K197E::KanMx; ALD6; | R3V/L21G/ |
| | | | ASC1L641P; NPGA; MAF1; PGK1p: Acc1; tHMGR1; IDI; | T49R/S60T |
| | | | DiPKS_G1516R X 5; ACC1_S659A_S1157A; UBI4p: | |
| | | | ERG20; pGAL: OAC; pGAL: PT254 | |
| PLT1509-A6 | -URA, -LEU | PLAS-617 | Saccharomyces cerevisiae | OXC154- |
| | | | CEN.PK2; ΔLEU2; ΔURA3; Erg20K197E::KanMx; ALD6; | G351I/I372L |
| | | | ASC1L641P; NPGA; MAF1; PGK1p: Acc1; tHMGR1; IDI; | |
| | | | DiPKS_G1516R X 5; ACC1_S659A_S1157A; UBI4p: | |
| | | | ERG20; pGAL: OAC; pGAL: PT254 | |
| PLT1508-E5 | -URA, -LEU | PLAS-618 | Saccharomyces cerevisiae | OXC154- |
| | | | CEN.PK2; ΔLEU2; ΔURA3; Erg20K197E::KanMx; ALD6; | G351I/A383V/ |
| | | | ASC1L641P; NPGA; MAF1; PGK1p: Acc1; tHMGR1; IDI; | L451G |
| | | | DiPKS_G1516R X 5; ACC1_S659A_S1157A; UBI4p: | |
| | | | ERG20; pGAL: OAC; pGAL: PT254 | |
| PLT1508-F5 | -URA, -LEU | PLAS-619 | Saccharomyces cerevisiae | OXC154- |
| | | | CEN.PK2; ΔLEU2; ΔURA3; Erg20K197E::KanMx; ALD6; | G351R/I372L/ |
| | | | ASC1L641P; NPGA; MAF1; PGK1p: Acc1; tHMGR1; IDI; | L451G |
| | | | DiPKS_G1516R X 5; ACC1_S659A_S1157A; UBI4p: | |
| | | | ERG20; pGAL: OAC; pGAL: PT254 | |
| PLT1509-A10 | -URA, -LEU | PLAS-620 | Saccharomyces cerevisiae | OXC154- |
| | | | CEN.PK2; ΔLEU2; ΔURA3; Erg20K197E::KanMx; ALD6; | G351I/I372L/ |
| | | | ASC1L641P; NPGA; MAF1; PGK1p: Acc1; tHMGR1; IDI; | A383V/L451G |
| | | | DiPKS_G1516R X 5; ACC1_S659A_S1157A; UBI4p: | |
| | | | ERG20; pGAL: OAC; pGAL: PT254 | |
| PLT1508-A10 | -URA, -LEU | PLAS-621 | Saccharomyces cerevisiae | OXC154- |
| | | | CEN.PK2; ΔLEU2; ΔURA3; Erg20K197E::KanMx; ALD6; | G351R/I372L/ |
| | | | ASC1L641P; NPGA; MAF1; PGK1p: Acc1; tHMGR1; IDI; | A383V/L451G |
| | | | DiPKS_G1516R X 5; ACC1_S659A_S1157A; UBI4p: | |
| | | | ERG20; pGAL: OAC; pGAL: PT254 | |
| PLT1507-E8 | -URA, -LEU | PLAS-622 | Saccharomyces cerevisiae | OXC154- |
| | | | CEN.PK2; ΔLEU2; ΔURA3; Erg20K197E::KanMx; ALD6; | G351I/I372L/ |
| | | | ASC1L641P; NPGA; MAF1; PGK1p: Acc1; tHMGR1; IDI; | A383V |
| | | | DiPKS_G1516R X 5; ACC1_S659A_S1157A; UBI4p: | |
| | | | ERG20; pGAL: OAC; pGAL: PT254 | |
| PLT1507-B8 | -URA, -LEU | PLAS-623 | Saccharomyces cerevisiae | OXC154- |
| | | | CEN.PK2; ΔLEU2; ΔURA3; Erg20K197E::KanMx; ALD6; | N331G/ |
| | | | ASC1L641P; NPGA; MAF1; PGK1p: Acc1; tHMGR1; IDI; | Q349G/I372L/ |
| | | | DiPKS_G1516R X 5; ACC1_S659A_S1157A; UBI4p: | L451G |
| | | | ERG20; pGAL: OAC; pGAL: PT254 | |
| PLT1508-A6 | -URA, -LEU | PLAS-624 | Saccharomyces cerevisiae | OXC154- |
| | | | CEN.PK2; ΔLEU2; ΔURA3; Erg20K197E::KanMx; ALD6; | G351R/ |
| | | | ASC1L641P; NPGA; MAF1; PGK1p: Acc1; tHMGR1; IDI; | A383V/L451G |
| | | | DiPKS_G1516R X 5; ACC1_S659A_S1157A; UBI4p: | |
| | | | ERG20; pGAL: OAC; pGAL: PT254 | |
| PLT1508-H4 | -URA, -LEU | PLAS-625 | Saccharomyces cerevisiae | OXC154- |
| | | | CEN.PK2; ΔLEU2; ΔURA3; Erg20K197E::KanMx; ALD6; | Q349G/ |
| | | | ASC1L641P; NPGA; MAF1; PGK1p: Acc1; tHMGR1; IDI; | A383V/L451G |
| | | | DiPKS_G1516R X 5; ACC1_S659A_S1157A; UBI4p: | |
| | | | ERG20; pGAL: OAC; pGAL: PT254 | |
| PLT1507-E9 | -URA, -LEU | PLAS-626 | Saccharomyces cerevisiae | OXC154- |
| | | | CEN.PK2; ΔLEU2; ΔURA3; Erg20K197E::KanMx; ALD6; | A383V/ |
| | | | ASC1L641P; NPGA; MAF1; PGK1p: Acc1; tHMGR1; IDI; | L451G |
| | | | DiPKS_G1516R X 5; ACC1_S659A_S1157A; UBI4p: | |
| | | | ERG20; pGAL: OAC; pGAL: PT254 | |
| PLT1507-E12 | -URA, -LEU | PLAS-627 | Saccharomyces cerevisiae | OXC154- |
| | | | CEN.PK2; ΔLEU2; ΔURA3; Erg20K197E::KanMx; ALD6; | N331G/ |
| | | | ASC1L641P; NPGA; MAF1; PGK1p: Acc1; tHMGR1; IDI; | Q349G |
| | | | DiPKS_G1516R X 5; ACC1_S659A_S1157A; UBI4p: | |
| | | | ERG20; pGAL: OAC; pGAL: PT254 | |
| PLT1507-B3 | -URA, -LEU | PLAS-628 | Saccharomyces cerevisiae | OXC154- |
| | | | CEN.PK2; ΔLEU2; ΔURA3; Erg20K197E::KanMx; ALD6; | G351I |
| | | | ASC1L641P; NPGA; MAF1; PGK1p: Acc1; tHMGR1; IDI; | |
| | | | DiPKS_G1516R X 5; ACC1_S659A_S1157A; UBI4p: | |
| | | | ERG20; pGAL: OAC; pGAL: PT254 | |
| PLT1509-A11 | -URA, -LEU | PLAS-629 | Saccharomyces cerevisiae | OXC154- |
| | | | CEN.PK2; ΔLEU2; ΔURA3; Erg20K197E::KanMx; ALD6; | L451G |
| | | | ASC1L641P; NPGA; MAF1; PGK1p: Acc1; tHMGR1; IDI; | |
| | | | DiPKS_G1516R X 5; ACC1_S659A_S1157A; UBI4p: | |
| | | | ERG20; pGAL: OAC; pGAL: PT254 | |
| PLT1507-H7 | -URA, -LEU | PLAS-630 | Saccharomyces cerevisiae | OXC154- |
| | | | CEN.PK2; ΔLEU2; ΔURA3; Erg20K197E::KanMx; ALD6; | N331G/G351I/ |
| | | | ASC1L641P; NPGA; MAF1; PGK1 p: Acc1; tHMGR1; IDI; | I372L/A383V |
| | | | DiPKS_G1516R X 5; ACC1_S659A_S1157A; UBI4p: | |
| | | | ERG20; pGAL: OAC; pGAL: PT254 | |

[0226] The following plasmids were used, as described in Table 4.

TABLE 4
Plasmids

| | Plasmid | | | |
|---|---|---|---|---|
| # | Name | SEQ ID NO: | Description | Selection |
| 1 | PLAS415 | SEQ ID NO: 1 | Ostl-pro-alpha-f(I)-OXC52-VB40 | Uracil |
| 2 | PLAS513 | SEQ ID NO: 2 | Ostl-pro-alpha-f(I)-OXC154-VB40 | Uracil |
| 3 | PLAS416 | SEQ ID NO: 3 | RFP mScarlet | RFP |
| 4 | PLAS462 | SEQ ID NO: 4 | Ostl-pro-alpha-f(I)-OXC154-S88A/L451G-VB40 | Uracil |
| 5 | PLAS-564 | SEQ ID NO: 5 | OXC154-R3G(=GGG)/L21G/S60T/S88A(=GCT)- | Uracil |
| | | | VB40 | |
| 6 | PLAS-565 | SEQ ID NO: 6 | OXC154- | Uracil |
| | | | R3G(=GGG)/A18E/T49R/S60T/S88A(=GCT)-VB40 | |
| 7 | PLAS-566 | SEQ ID NO: 7 | OXC154-R3T/T49R/S88A(=GCC)-VB40 | Uracil |
| 8 | PLAS-567 | SEQ ID NO: 8 | OXC154-R3W/A18E/T49R/S60T/S88A(=GCT)-VB40 | Uracil |
| 9 | PLAS-568 | SEQ ID NO: 9 | OXC154-R3V/T49R/S60T/S88A(=GCT)-VB40 | Uracil |
| 10 | PLAS-569 | SEQ ID NO: 10 | OXC154-R3V/T49R/S60T/S88A(=GCC)-VB40 | Uracil |
| 11 | PLAS-570 | SEQ ID NO: 11 | OXC154-A18A(=GCC)-VB40 | Uracil |
| 12 | PLAS-571 | SEQ ID NO: 12 | OXC154-R3T/A18E/T49R/S88A(=GCC)-VB40 | Uracil |
| 13 | PLAS-572 | SEQ ID NO: 13 | OXC154-R3T/S88A(=GCC)-VB40 | Uracil |
| 14 | PLAS-573 | SEQ ID NO: 14 | OXC154-R3G(=GGG)/L21G/T49R-VB40 | Uracil |
| 15 | PLAS-574 | SEQ ID NO: 15 | OXC154-R3T/T49R/S88A(=GCT)-VB40 | Uracil |
| 16 | PLAS-575 | SEQ ID NO: 16 | OXC154- | Uracil |
| | | | R3G(=GGA)/A18E/T49R/S60T/S88A(=GCC)-VB40 | |
| 17 | PLAS-576 | SEQ ID NO: 17 | OXC154-R3W/T49R/S88A(=GCC)/V97E-VB40 | Uracil |
| 18 | PLAS-577 | SEQ ID NO: 18 | OXC154-R3G(=GGG)/A18E/S88A(=GCC)-VB40 | Uracil |
| 19 | PLAS-578 | SEQ ID NO: 19 | OXC154-R3V/A18E/T49R/S60T/S88A(=GCC)-VB40 | Uracil |
| 20 | PLAS-579 | SEQ ID NO: 20 | OXC154-S60T/S88A(=GCC)-VB40 | Uracil |
| 21 | PLAS-580 | SEQ ID NO: 21 | OXC154-R3T/A18E/T49R/S60T/S88A(=GCT)-VB40 | Uracil |
| 22 | PLAS-581 | SEQ ID NO: 22 | OXC154-R3W/L21G/T49R/S88A(=GCC)/V97E- | Uracil |
| | | | VB40 | |
| 23 | PLAS-582 | SEQ ID NO: 23 | OXC154-R3T/A18E/T49R/S60T-VB40 | Uracil |
| 24 | PLAS-583 | SEQ ID NO: 24 | OXC154-P2W/T26A/S60T-VB40 | Uracil |
| 25 | PLAS-584 | SEQ ID NO: 25 | OXC154- | Uracil |
| | | | R3G(=GGG)/L21G/S60T/S88A(=GCC)/V97E-VB40 | |
| 26 | PLAS-585 | SEQ ID NO: 26 | OXC154-R3G(=GGG)/A18E/T49R/S88A(=GCC)- | Uracil |
| | | | VB40 | |
| 27 | PLAS-586 | SEQ ID NO: 27 | OXC154-R3T/L21G/S60T/S88A(=GCC)/V97D-VB40 | Uracil |
| 28 | PLAS-587 | SEQ ID NO: 28 | OXC154-P2W/L21G/T49R/S88A(=GCC)/V97E- | Uracil |
| | | | VB40 | |
| 29 | PLAS-588 | SEQ ID NO: 29 | OXC154-R3G(=GGG)/L21G/T49R/S88A(=GCT)- | Uracil |
| | | | VB40 | |
| 30 | PLAS-589 | SEQ ID NO: 30 | OXC154-S295S(=TCA)-VB40 | Uracil |
| 31 | PLAS-590 | SEQ ID NO: 31 | OXC154-R3V/L21G/S60T/S88A(=GCC)-VB40 | Uracil |
| 32 | PLAS-591 | SEQ ID NO: 32 | OXC154-R3T/A18E/S88A(=GCC)-VB40 | Uracil |
| 33 | PLAS-592 | SEQ ID NO: 33 | OXC154-S60T/S88A(=GCT)-VB40 | Uracil |
| 34 | PLAS-593 | SEQ ID NO: 34 | OXC154-R3W/T49R/S88A(=GCT)-VB40 | Uracil |
| 35 | PLAS-594 | SEQ ID NO: 35 | OXC154-T49R/S88A(=GCC)-VB40 | Uracil |
| 36 | PLAS-595 | SEQ ID NO: 36 | OXC154-R3W/S47F-VB40 | Uracil |
| 37 | PLAS-596 | SEQ ID NO: 37 | OXC154-A347G/I372L/L451G-VB40 | Uracil |
| 38 | PLAS-597 | SEQ ID NO: 38 | OXC154-R3G(=GGG)/L21G/S60T-VB40 | Uracil |
| 39 | PLAS-598 | SEQ ID NO: 39 | OXC154-R3T/L21G/T49R/S88A(=GCT)-VB40 | Uracil |
| 40 | PLAS-599 | SEQ ID NO: 40 | OXC154-R3T/L21G/S60T-VB40 | Uracil |
| 41 | PLAS-600 | SEQ ID NO: 41 | OXC154-R3W/L21G/S88A(=GCT)-VB40 | Uracil |
| 42 | PLAS-601 | SEQ ID NO: 42 | OXC154-L21G/T49R/S60T/S88A(=GCT)-VB40 | Uracil |
| 43 | PLAS-602 | SEQ ID NO: 43 | OXC154-A347G/A383V-VB40 | Uracil |
| 44 | PLAS-603 | SEQ ID NO: 44 | OXC154-R3W/L21G/T49R/S60T/S88A(=GCT)-VB40 | Uracil |
| 45 | PLAS-604 | SEQ ID NO: 45 | OXC154-A18E/S88A(=GCC)-VB40 | Uracil |
| 46 | PLAS-605 | SEQ ID NO: 46 | OXC154-R3W/L21G/T49R-VB40 | Uracil |
| 47 | PLAS-606 | SEQ ID NO: 47 | OXC154-A347G/L451G-VB40 | Uracil |
| 48 | PLAS-607 | SEQ ID NO: 48 | OXC154-A347G/I372L/A383V/L451G-VB40 | Uracil |
| 49 | PLAS-608 | SEQ ID NO: 49 | OXC154-I372L/A383V/L451G-VB40 | Uracil |
| 50 | PLAS-609 | SEQ ID NO: 50 | OXC154-R3V/T49R/S88A(=GCT)-VB40 | Uracil |
| 51 | PLAS-610 | SEQ ID NO: 51 | OXC154-R3G(=GGG)/A18E/S60T-VB40 | Uracil |
| 52 | PLAS-611 | SEQ ID NO: 52 | OXC154-A347G/I372L/A383V-VB40 | Uracil |
| 53 | PLAS-612 | SEQ ID NO: 53 | OXC154-R3T-VB40 | Uracil |
| 54 | PLAS-613 | SEQ ID NO: 54 | OXC154-R3V/A18E/T49R/V97E-VB40 | Uracil |
| 55 | PLAS-614 | SEQ ID NO: 55 | OXC154-R3T/L21G/T49R/S60T/S88A(=GCT)-VB40 | Uracil |
| 56 | PLAS-615 | SEQ ID NO: 56 | OXC154-R3T/L21G/T49R/V97E-VB40 | Uracil |
| 57 | PLAS-616 | SEQ ID NO: 57 | OXC154-R3V/L21G/T49R/S60T-VB40 | Uracil |
| 58 | PLAS-617 | SEQ ID NO: 58 | OXC154-G351I/I372L-VB40 | Uracil |
| 59 | PLAS-618 | SEQ ID NO: 59 | OXC154-G351I/A383V/L451G-VB40 | Uracil |
| 60 | PLAS-619 | SEQ ID NO: 60 | OXC154-G351R/I372L/L451G-VB40 | Uracil |
| 61 | PLAS-620 | SEQ ID NO: 61 | OXC154-G351I/I372L/A383V/L451G-VB40 | Uracil |
| 62 | PLAS-621 | SEQ ID NO: 62 | OXC154-G351R/I372L/A383V/L451G-VB40 | Uracil |
| 63 | PLAS-622 | SEQ ID NO: 63 | OXC154-G351I/I372L/A383V-VB40 | Uracil |
| 64 | PLAS-623 | SEQ ID NO: 64 | OXC154-N331G/Q349G/I372L/L451G-VB40 | Uracil |
| 65 | PLAS-624 | SEQ ID NO: 65 | OXC154-G351R/A383V/L451G-VB40 | Uracil |
| 66 | PLAS-625 | SEQ ID NO: 66 | OXC154-Q349G/A383V/L451G-VB40 | Uracil |
| 67 | PLAS-626 | SEQ ID NO: 67 | OXC154-A383V/L451G-VB40 | Uracil |
| 68 | PLAS-627 | SEQ ID NO: 68 | OXC154-N331G/Q349G-VB40 | Uracil |
| 69 | PLAS-628 | SEQ ID NO: 69 | OXC154-G351I-VB40 | Uracil |
| 70 | PLAS-629 | SEQ ID NO: 70 | OXC154-L451G-VB40 | Uracil |
| 71 | PLAS-630 | SEQ ID NO: 71 | OXC154-N331G/G351I/I372L/A383V-VB40 | Uracil |

[0227] The following sequences are described herein (Table 5). shows further sequences described herein. Assigned descriptive names for sequences indicate the starting sequence from which mutations are made, such as from “OXC154”. Where OXC154 is indicated, the listed mutated residues in the descriptive name are changed from SEQ ID NO:141, which is the mutated protein from wild type OXC52 (SEQ ID NO:140) by having a serine insertion between residues P224 and K225. For example, SEQ ID NO: 138 (Protein), is assigned “OXC154-L451G” as its descriptive name. Thus, for this sequence the mutation from SEQ ID NO:141 (OXC154) is L451G.

TABLE 5
Sequences

| | | DNA/ | Length of | Position of coding |
|---|---|---|---|---|
| SEQ ID NO: | Description | Protein | sequence | sequence |
| SEQ ID NO: 1 | Ostl-pro-alpha-f(I)-OXC52 | DNA | 7263 | 2925 to 4496 |
| SEQ ID NO: 2 | Ostl-pro-alpha-f(I)-OXC154 | DNA | 7266 | 2925 to 4499 |
| SEQ ID NO: 3 | RFP mScarlet | DNA | 6114 | 2649-3347 |
| SEQ ID NO: 4 | OXC154-S88A/L451G | DNA | 7266 | 2925 to 4499 |
| SEQ ID NO: 5 | OXC154- | DNA | 7266 | 2925 to 4499 |
| | R3G(=GGG)/L21G/S60T/S88A(=GCT) | | | |
| SEQ ID NO: 6 | OXC154- | DNA | 7266 | 2925 to 4499 |
| | R3G(=GGG)/A18E/T49R/S60T/S88A(=GCT) | | | |
| SEQ ID NO: 7 | OXC154-R3T/T49R/S88A(=GCC) | DNA | 7266 | 2925 to 4499 |
| SEQ ID NO: 8 | OXC154- | DNA | 7266 | 2925 to 4499 |
| | R3W/A18E/T49R/S60T/S88A(=GCT) | | | |
| SEQ ID NO: 9 | OXC154- | DNA | 7266 | 2925 to 4499 |
| | R3V/T49R/S60T/S88A(=GCT) | | | |
| SEQ ID NO: 10 | OXC154- | DNA | 7266 | 2925 to 4499 |
| | R3V/T49R/S60T/S88A(=GCC) | | | |
| SEQ ID NO: 11 | OXC154-A18A(=GCC) | DNA | 7266 | 2925 to 4499 |
| SEQ ID NO: 12 | OXC154- | DNA | 7266 | 2925 to 4499 |
| | R3T/A18E/T49R/S88A(=GCC) | | | |
| SEQ ID NO: 13 | OXC154-R3T/S88A(=GCC) | DNA | 7266 | 2925 to 4499 |
| SEQ ID NO: 14 | OXC154-R3G(=GGG)/L21G/T49R | DNA | 7266 | 2925 to 4499 |
| SEQ ID NO: 15 | OXC154-R3T/T49R/S88A(=GCT) | DNA | 7266 | 2925 to 4499 |
| SEQ ID NO: 16 | OXC154- | DNA | 7266 | 2925 to 4499 |
| | R3G(=GGA)/A18E/T49R/S60T/S88A(=GCC) | | | |
| SEQ ID NO: 17 | OXC154- | DNA | 7266 | 2925 to 4499 |
| | R3W/T49R/S88A(=GCC)/V97E | | | |
| SEQ ID NO: 18 | OXC154- | DNA | 7266 | 2925 to 4499 |
| | R3G(=GGG)/A18E/S88A(=GCC) | | | |
| SEQ ID NO: 19 | OXC154- | DNA | 7266 | 2925 to 4499 |
| | R3V/A18E/T49R/S60T/S88A(=GCC) | | | |
| SEQ ID NO: 20 | OXC154-S60T/S88A(=GCC) | DNA | 7266 | 2925 to 4499 |
| SEQ ID NO: 21 | OXC154- | DNA | 7266 | 2925 to 4499 |
| | R3T/A18E/T49R/S60T/S88A(=GCT) | | | |
| SEQ ID NO: 22 | OXC154- | DNA | 7266 | 2925 to 4499 |
| | R3W/L21G/T49R/S88A(=GCC)/V97E | | | |
| SEQ ID NO: 23 | OXC154-R3T/A18E/T49R/S60T | DNA | 7266 | 2925 to 4499 |
| SEQ ID NO: 24 | OXC154-P2W/T26A/S60T | DNA | 7266 | 2925 to 4499 |
| SEQ ID NO: 25 | OXC154- | DNA | 7266 | 2925 to 4499 |
| | R3G(=GGG)/L21G/S60T/S88A(=GCC)/V97E | | | |
| SEQ ID NO: 26 | OXC154- | DNA | 7266 | 2925 to 4499 |
| | R3G(=GGG)/A18E/T49R/S88A(=GCC) | | | |
| SEQ ID NO: 27 | OXC154- | DNA | 7266 | 2925 to 4499 |
| | R3T/L21G/S60T/S88A(=GCC)/V97D | | | |
| SEQ ID NO: 28 | OXC154- | DNA | 7266 | 2925 to 4499 |
| | P2W/L21G/T49R/S88A(=GCC)/V97E | | | |
| SEQ ID NO: 29 | OXC154- | DNA | 7266 | 2925 to 4499 |
| | R3G(=GGG)/L21G/T49R/S88A(=GCT) | | | |
| SEQ ID NO: 30 | OXC154-S295S(=TCA) | DNA | 7266 | 2925 to 4499 |
| SEQ ID NO: 31 | OXC154- | DNA | 7266 | 2925 to 4499 |
| | R3V/L21G/S60T/S88A(=GCC) | | | |
| SEQ ID NO: 32 | OXC154-R3T/A18E/S88A(=GCC) | DNA | 7266 | 2925 to 4499 |
| SEQ ID NO: 33 | OXC154-S60T/S88A(=GCT) | DNA | 7266 | 2925 to 4499 |
| SEQ ID NO: 34 | OXC154-R3W/T49R/S88A(=GCT) | DNA | 7266 | 2925 to 4499 |
| SEQ ID NO: 35 | OXC154-T49R/S88A(=GCC) | DNA | 7266 | 2925 to 4499 |
| SEQ ID NO: 36 | OXC154-R3W/S47F | DNA | 7266 | 2925 to 4499 |
| SEQ ID NO: 37 | OXC154-A347G/I372L/L451G | DNA | 7266 | 2925 to 4499 |
| SEQ ID NO: 38 | OXC154-R3G(=GGG)/L21G/S60T | DNA | 7266 | 2925 to 4499 |
| SEQ ID NO: 39 | OXC154- | DNA | 7266 | 2925 to 4499 |
| | R3T/L21G/T49R/S88A(=GCT) | | | |
| SEQ ID NO: 40 | OXC154-R3T/L21G/S60T | DNA | 7266 | 2925 to 4499 |
| SEQ ID NO: 41 | OXC154-R3W/L21G/S88A(=GCT) | DNA | 7266 | 2925 to 4499 |
| SEQ ID NO: 42 | OXC154- | DNA | 7266 | 2925 to 4499 |
| | L21G/T49R/S60T/S88A(=GCT) | | | |
| SEQ ID NO: 43 | OXC154-A347G/A383V | DNA | 7266 | 2925 to 4499 |
| SEQ ID NO: 44 | OXC154- | DNA | 7266 | 2925 to 4499 |
| | R3W/L21G/T49R/S60T/S88A(=GCT) | | | |
| SEQ ID NO: 45 | OXC154-A18E/S88A(=GCC) | DNA | 7266 | 2925 to 4499 |
| SEQ ID NO: 46 | OXC154-R3W/L21G/T49R | DNA | 7266 | 2925 to 4499 |
| SEQ ID NO: 47 | OXC154-A347G/L451G | DNA | 7266 | 2925 to 4499 |
| SEQ ID NO: 48 | OXC154-A347G/I372L/A383V/L451G | DNA | 7266 | 2925 to 4499 |
| SEQ ID NO: 49 | OXC154-I372L/A383V/L451G | DNA | 7266 | 2925 to 4499 |
| SEQ ID NO: 50 | OXC154-R3V/T49R/S88A(=GCT) | DNA | 7266 | 2925 to 4499 |
| SEQ ID NO: 51 | OXC154-R3G(=GGG)/A18E/S60T | DNA | 7266 | 2925 to 4499 |
| SEQ ID NO: 52 | OXC154-A347G/I372L/A383V | DNA | 7266 | 2925 to 4499 |
| SEQ ID NO: 53 | OXC154-R3T | DNA | 7266 | 2925 to 4499 |
| SEQ ID NO: 54 | OXC154-R3V/A18E/T49R/V97E | DNA | 7266 | 2925 to 4499 |
| SEQ ID NO: 55 | OXC154- | DNA | 7266 | 2925 to 4499 |
| | R3T/L21G/T49R/S60T/S88A(=GCT) | | | |
| SEQ ID NO: 56 | OXC154-R3T/L21G/T49R/V97E | DNA | 7266 | 2925 to 4499 |
| SEQ ID NO: 57 | OXC154-R3V/L21G/T49R/S60T | DNA | 7266 | 2925 to 4499 |
| SEQ ID NO: 58 | OXC154-G351I/I372L | DNA | 7266 | 2925 to 4499 |
| SEQ ID NO: 59 | OXC154-G351I/A383V/L451G | DNA | 7266 | 2925 to 4499 |
| SEQ ID NO: 60 | OXC154-G351R/I372L/L451G | DNA | 7266 | 2925 to 4499 |
| SEQ ID NO: 61 | OXC154-G351I/I372L/A383V/L451G | DNA | 7266 | 2925 to 4499 |
| SEQ ID NO: 62 | OXC154-G351R/I372L/A383V/L451G | DNA | 7266 | 2925 to 4499 |
| SEQ ID NO: 63 | OXC154-G351I/I372L/A383V | DNA | 7266 | 2925 to 4499 |
| SEQ ID NO: 64 | OXC154-N331G/Q349G/I372L/L451G | DNA | 7266 | 2925 to 4499 |
| SEQ ID NO: 65 | OXC154-G351R/A383V/L451G | DNA | 7266 | 2925 to 4499 |
| SEQ ID NO: 66 | OXC154-Q349G/A383V/L451G | DNA | 7266 | 2925 to 4499 |
| SEQ ID NO: 67 | OXC154-A383V/L451G | DNA | 7266 | 2925 to 4499 |
| SEQ ID NO: 68 | OXC154-N331G/Q349G | DNA | 7266 | 2925 to 4499 |
| SEQ ID NO: 69 | OXC154-G351I | DNA | 7266 | 2925 to 4499 |
| SEQ ID NO: 70 | OXC154-L451G | DNA | 7266 | 2925 to 4499 |
| SEQ ID NO: 71 | OXC154-N331G/G351I/I372L/A383V | DNA | 7266 | 2925 to 4499 |
| SEQ ID NO: 72 | OXC154-S88A/L451G | Protein | 524 | All |
| SEQ ID NO: 73 | OXC154- | Protein | 524 | All |
| | R3G(=GGG)/L21G/S60T/S88A(=GCT) | | | |
| SEQ ID NO: 74 | OXC154- | Protein | 524 | All |
| | R3G(=GGG)/A18E/T49R/S60T/S88A(=GCT) | | | |
| SEQ ID NO: 75 | OXC154-R3T/T49R/S88A(=GCC) | Protein | 524 | All |
| SEQ ID NO: 76 | OXC154- | Protein | 524 | All |
| | R3W/A18E/T49R/S60T/S88A(=GCT) | | | |
| SEQ ID NO: 77 | OXC154- | Protein | 524 | All |
| | R3V/T49R/S60T/S88A(=GCT) | | | |
| SEQ ID NO: 78 | OXC154- | Protein | 524 | All |
| | R3V/T49R/S60T/S88A(=GCC) | | | |
| SEQ ID NO: 79 | OXC154-A18A(=GCC) | Protein | 524 | All |
| SEQ ID NO: 80 | OXC154- | Protein | 524 | All |
| | R3T/A18E/T49R/S88A(=GCC) | | | |
| SEQ ID NO: 81 | OXC154-R3T/S88A(=GCC) | Protein | 524 | All |
| SEQ ID NO: 82 | OXC154-R3G(=GGG)/L21G/T49R | Protein | 524 | All |
| SEQ ID NO: 83 | OXC154-R3T/T49R/S88A(=GCT) | Protein | 524 | All |
| SEQ ID NO: 84 | OXC154- | Protein | 524 | All |
| | R3G(=GGA)/A18E/T49R/S60T/S88A(=GCC) | | | |
| SEQ ID NO: 85 | OXC154- | Protein | 524 | All |
| | R3W/T49R/S88A(=GCC)/V97E | | | |
| SEQ ID NO: 86 | OXC154- | Protein | 524 | All |
| | R3G(=GGG)/A18E/S88A(=GCC) | | | |
| SEQ ID NO: 87 | OXC154- | Protein | 524 | All |
| | R3V/A18E/T49R/S60T/S88A(=GCC) | | | |
| SEQ ID NO: 88 | OXC154-S60T/S88A(=GCC) | Protein | 524 | All |
| SEQ ID NO: 89 | OXC154- | Protein | 524 | All |
| | R3T/A18E/T49R/S60T/S88A(=GCT) | | | |
| SEQ ID NO: 90 | OXC154- | Protein | 524 | All |
| | R3W/L21G/T49R/S88A(=GCC)/V97E | | | |
| SEQ ID NO: 91 | OXC154-R3T/A18E/T49R/S60T | Protein | 524 | All |
| SEQ ID NO: 92 | OXC154-P2W/T26A/S60T | Protein | 524 | All |
| SEQ ID NO: 93 | OXC154- | Protein | 524 | All |
| | R3G(=GGG)/L21G/S60T/S88A(=GCC)/V97E | | | |
| SEQ ID NO: 94 | OXC154- | Protein | 524 | All |
| | R3G(=GGG)/A18E/T49R/S88A(=GCC) | | | |
| SEQ ID NO: 95 | OXC154- | Protein | 524 | All |
| | R3T/L21G/S60T/S88A(=GCC)/V97D | | | |
| SEQ ID NO: 96 | OXC154- | Protein | 524 | All |
| | P2W/L21G/T49R/S88A(=GCC)/V97E | | | |
| SEQ ID NO: 97 | OXC154- | Protein | 524 | All |
| | R3G(=GGG)/L21G/T49R/S88A(=GCT) | | | |
| SEQ ID NO: 98 | OXC154-S295S(=TCA) | Protein | 524 | All |
| SEQ ID NO: 99 | OXC154- | Protein | 524 | All |
| | R3V/L21G/S60T/S88A(=GCC) | | | |
| SEQ ID NO: 100 | OXC154-R3T/A18E/S88A(=GCC) | Protein | 524 | All |
| SEQ ID NO: 101 | OXC154-S60T/S88A(=GCT) | Protein | 524 | All |
| SEQ ID NO: 102 | OXC154-R3W/T49R/S88A(=GCT) | Protein | 524 | All |
| SEQ ID NO: 103 | OXC154-T49R/S88A(=GCC) | Protein | 524 | All |
| SEQ ID NO: 104 | OXC154-R3W/S47F | Protein | 524 | All |
| SEQ ID NO: 105 | OXC154-A347G/I372L/L451G | Protein | 524 | All |
| SEQ ID NO: 106 | OXC154-R3G(=GGG)/L21G/S60T | Protein | 524 | All |
| SEQ ID NO: 107 | OXC154- | Protein | 524 | All |
| | R3T/L21G/T49R/S88A(=GCT) | | | |
| SEQ ID NO: 108 | OXC154-R3T/L21G/S60T | Protein | 524 | All |
| SEQ ID NO: 109 | OXC154-R3W/L21G/S88A(=GCT) | Protein | 524 | All |
| SEQ ID NO: 110 | OXC154- | Protein | 524 | All |
| | L21G/T49R/S60T/S88A(=GCT) | | | |
| SEQ ID NO: 111 | OXC154-A347G/A383V | Protein | 524 | All |
| SEQ ID NO: 112 | OXC154- | Protein | 524 | All |
| | R3W/L21G/T49R/S60T/S88A(=GCT) | | | |
| SEQ ID NO: 113 | OXC154-A18E/S88A(=GCC) | Protein | 524 | All |
| SEQ ID NO: 114 | OXC154-R3W/L21G/T49R | Protein | 524 | All |
| SEQ ID NO: 115 | OXC154-A347G/L451G | Protein | 524 | All |
| SEQ ID NO: 116 | OXC154-A347G/I372L/A383V/L451G | Protein | 524 | All |
| SEQ ID NO: 117 | OXC154-I372L/A383V/L451G | Protein | 524 | All |
| SEQ ID NO: 118 | OXC154-R3V/T49R/S88A(=GCT) | Protein | 524 | All |
| SEQ ID NO: 119 | OXC154-R3G(=GGG)/A18E/S60T | Protein | 524 | All |
| SEQ ID NO: 120 | OXC154-A347G/I372L/A383V | Protein | 524 | All |
| SEQ ID NO: 121 | OXC154-R3T | Protein | 524 | All |
| SEQ ID NO: 122 | OXC154-R3V/A18E/T49R/V97E | Protein | 524 | All |
| SEQ ID NO: 123 | OXC154- | Protein | 524 | All |
| | R3T/L21G/T49R/S60T/S88A(=GCT) | | | |
| SEQ ID NO: 124 | OXC154-R3T/L21G/T49R/V97E | Protein | 524 | All |
| SEQ ID NO: 125 | OXC154-R3V/L21G/T49R/S60T | Protein | 524 | All |
| SEQ ID NO: 126 | OXC154-G351I/I372L | Protein | 524 | All |
| SEQ ID NO: 127 | OXC154-G351I/A383V/L451G | Protein | 524 | All |
| SEQ ID NO: 128 | OXC154-G351R/I372L/L451G | Protein | 524 | All |
| SEQ ID NO: 129 | OXC154-G351I/I372L/A383V/L451G | Protein | 524 | All |
| SEQ ID NO: 130 | OXC154-G351R/I372L/A383V/L451G | Protein | 524 | All |
| SEQ ID NO: 131 | OXC154-G351I/I372L/A383V | Protein | 524 | All |
| SEQ ID NO: 132 | OXC154-N331G/Q349G/I372L/L451G | Protein | 524 | All |
| SEQ ID NO: 133 | OXC154-G351R/A383V/L451G | Protein | 524 | All |
| SEQ ID NO: 134 | OXC154-Q349G/A383V/L451G | Protein | 524 | All |
| SEQ ID NO: 135 | OXC154-A383V/L451G | Protein | 524 | All |
| SEQ ID NO: 136 | OXC154-N331G/Q349G | Protein | 524 | All |
| SEQ ID NO: 137 | OXC154-G351I | Protein | 524 | All |
| SEQ ID NO: 138 | OXC154-L451G | Protein | 524 | All |
| SEQ ID NO: 139 | OXC154-N331G/G351I/I372L/A383V | Protein | 524 | All |
| SEQ ID NO: 140 | OXC52 | Protein | 523 | All |
| SEQ ID NO: 141 | OXC154 | Protein | 524 | All |
| SEQ ID NO: 142 | NpgA | DNA | 3564 | 1170-2201 |
| SEQ ID NO: 143 | DiPKS-1 | DNA | 11114 | 849-10292 |
| SEQ ID NO: 144 | DiPKS-2 | DNA | 10890 | 717-10160 |
| SEQ ID NO: 145 | DiPKS-3 | DNA | 11300 | 795-10238 |
| SEQ ID NO: 146 | DiPKS-4 | DNA | 11140 | 794-10237 |
| SEQ ID NO: 147 | DiPKS-5 | DNA | 11637 | 1172-10615 |
| SEQ ID NO: 148 | PDH | DNA | 7114 | Ald6: 1444-2949 |
| | | | | ACS: 3888-5843 |
| SEQ ID NO: 149 | Maf1 | DNA | 3256 | 936-2123 |
| SEQ ID NO: 150 | Erg20K197E | DNA | 4254/(4538) | 2842-3900 |
| SEQ ID NO: 151 | Erg1p: UBI4-Erg20: deg | DNA | 3503 | 1364-2701 |
| SEQ ID NO: 152 | tHMGr-IDI | DNA | 4843/(4859) | tHMGRI: 885-2393 |
| | | | | IDI1: 3209-4075 |
| SEQ ID NO: 153 | PGK1p: ACC1^{S659A, S1157A} | DNA | 7673 | Pgk1p: 222-971 |
| | | | | Acc1mut: 972-7673 |
| SEQ ID NO: 154 | OAC | DNA | 2177 | 842-1150 |
| SEQ ID NO: 155 | PT254-R2S | DNA | 4707 | 1957-2925 |
| SEQ ID NO: 156 | Ostl-pro-alpha-f(I) | Protein | 92 | all |
| SEQ ID NO: 207 | OXC154 Mutant/Variant | Protein | 524 | all |
| | (generalized) | | | |
| SEQ ID NO: 206 | His tag | Protein | 6 | all |

[0228] Modifications to base strains used herein are outlined below in Table 6.

TABLE 6
Modifications to Base Strains

| | | | Integration | | Genetic |
|---|---|---|---|---|---|
| | Modification | SEQ ID | Region/ | | Structure of |
| # | name | NO: | Plasmid | Description | Sequence |
| 1 | NpgA | 142 | Flagfeldt | Phosphopantetheinyl Transferase | Site14Up::Tef1p: |
| | | | Site 14 | from Aspergillus niger. Accessory | NpgA: Prm9t: Site14Down |
| | | | integration | Protein for DiPKS (Kim et al., | |
| | | | | 2015) | |
| 2 | DiPKS-1 | 143 | USER Site | Type 1 FAS fused to Type 3 PKS | XII- |
| | | | XII-1 | from D. discoideum. Produces | 1up::Gal1p: DiPKSG1516R: |
| | | | integration | Olivetol from malonyl-coA | Prm9t::XII1-down |
| | | | (Jensen et | | |
| | | | al, 2014) | | |
| 3 | DiPKS-2 | 144 | Wu site 1 | Type 1 FAS fused to Type 3 PKS | Wu1up::Gal1p: |
| | | | integration | from D. discoideum. Produces | DiPKSG1516R: |
| | | | | Olivetol from malonyl-coA | Prm9t::Wu1down |
| 4 | DiPKS-3 | 145 | Wu site 3 | Type 1 FAS fused to Type 3 PKS | Wu3up::Gal1p: |
| | | | integration | from D. discoideum. Produces | DiPKSG1516R: |
| | | | | Olivetol from malonyl-coA | Prm9t::Wu3down |
| 5 | DiPKS-4 | 146 | Wu site 6 | Type 1 FAS fused to Type 3 PKS | Wu6up::Gal1p: |
| | | | integration | from D. discoideum. Produces | DiPKSG1516R: |
| | | | | Olivetol from malonyl-coA | Prm9t::Wu6down |
| 6 | DiPKS-5 | 147 | Wu site 18 | Type 1 FAS fused to Type 3 PKS | Wu18up::Gal1p: |
| | | | integration | from D. discoideum. Produces | DiPKSG1516R: |
| | | | | Olivetol from malonyl-coA | Prm9t::Wu18down |
| 7 | PDH | 148 | Flagfeldt | Acetaldehyde dehydrogenase | 19Up::Tdh3p: Ald6: |
| | | | Site 19 | (ALD6) from S. cerevisiae and | Adh1::Tef1p: seACS1^{L641p}: Prm9t::19Down |
| | | | integration | acetoacetyl coA synthase | |
| | | | | (AscL641P) from Salmonella | |
| | | | | enterica. Will allow greater | |
| | | | | accumulation of acetyl-coA in the | |
| | | | | cell. (Shiba et al., 2007) | |
| 8 | Maf1 | 149 | Flagfeldt | Maf1 is a regulator of tRNA | Site5Up::Tef1p: Maf1: |
| | | | Site 5 | biosynthesis. Overexpression in | Prm9t: Site5Down |
| | | | integration | S. cerevisiae has demonstrated | |
| | | | | higher monoterpene (GPP) yields | |
| | | | | (Liu et al., 2013) | |
| 9 | Erg20K197E | 150 | Chromosomal | Mutant of Erg20 protein that | Tpi1t: ERG20K197E: |
| | | | modification | diminishes FPP synthase activity | Cyc1t::Tef1p: KanMX: Tef1t |
| | | | | creating greater pool of GPP | |
| | | | | precursor. Negatively affects | |
| | | | | growth phenotype (Oswald et al., | |
| | | | | 2007) | |
| 10 | Erg1p: UBI4- | SEQ. | Flagfeldt | Sterol responsive promoter | Site18Up::Erg1p: |
| | Erg20: deg | 151 | Site 18 | controlling Erg20 protein activity. | UBI4deg: ERG20: Adh1t: |
| | | | integration | Allows for regular FPP synthase | Site18down |
| | | | | activity and uninhibited growth | |
| | | | | phenotype until accumulation of | |
| | | | | sterols which leads to a | |
| | | | | suppression of expression of | |
| | | | | enzyme. (Peng et al., 2018) | |
| 11 | tHMGr- | 152 | USER Site | Overexpression of truncated | X3up::Tdh3p: tHMGR1: |
| | IDI | | X-3 | HMGr1 and IDI1 proteins that | Adh1t::Tef1p: IDI1: |
| | | | integration | have been previously identified to | Prm9t::X3down |
| | | | | be bottlenecks in the | |
| | | | | S. cerevisiae terpenoid pathway | |
| | | | | responsible for GPP production | |
| | | | | (Ro et al., 2006) | |
| 12 | PGK1p: | 153 | Chromosomal | Mutations in the native | Pgk1: ACC1^{S659A, S1157A}: |
| | ACC1^{S659A, S1157A} | | modification | S. cerevisiae acetyl-coA | Acc1t |
| | | | | carboxylase that removes post- | |
| | | | | translational modification based | |
| | | | | down-regulation. Leads to greater | |
| | | | | malonyl-coA pools. The promoter | |
| | | | | of Acc1 was also changed to a | |
| | | | | constitutive promoter for higher | |
| | | | | expression (Shi et al., 2014) | |
| 13 | OAC | 154 | Flagfeldt | The Cannabis sativa Olivetolic | FgF16up::Gal1p: csOAC: |
| | | | Site 16 | acid cyclase (OAC) protein allows | Eno2t::FgF16down |
| | | | integration | the production of olivetolic acid | |
| | | | | from a polyketide precursor. | |
| 14 | PT254- | 155 | Flagfeldt | The Cannabis sativa | FgF18up::Tef1p: |
| | R2S | | Site 18 | prenyltransferase PT254 allows | R2S-PT254: Cyct::FgF20down |
| | | | integration | CBGa to be produced from | |
| | | | | olivetolic acid and geranyl | |
| | | | | pyrophosphate (Luo et al., 2019). | |
| | | | | The N terminal arginine of this | |
| | | | | enzyme has been replaced with a | |
| | | | | serine in order to enhance protein | |
| | | | | stability in accordance with N-end | |
| | | | | rule (Varshavsky 1996). | |

[0229] Results:

[0230] Production of Cannabidiolic Acid

[0231] An OXC154 variant library was constructed in a plasmid regulated by the Gal1p promoter, and expressed in a CBGa-producing background strain (HB965) harbouring upstream enzymes of the cannabinoid production pathway. Strains expressing wild type OXC154 (HB21) and mScarlet fluorescent non-catalytic protein (HB1741) were utilized as controls in the screening to facilitate identification of OXC154 variants with improved activity.

[0232] FIG. 5 shows cannabinoid CBDa production by engineered DXC154 variant strains. The CBDa production values (mg/I) observed for the different engineered OXC154 variant strains are shown.

[0233] Table 7 relates further information regarding cannabinoid production of the strains shown in FIG. 5. In particular, Table 7 shows production of olivetol, olivetolic acid, CBGa, THCa, CBDa, lists 00600, reports ratio of CBDa to [THCa+CBDa] combined, ratio of C+Da to [CBGa+CBDa] combined, and reports the ratio of CBDa to upstream metabolites in wild type and engineered OXC154 mutant strains.

TABLE 7
Production of CBDa, Upstream Metabolites, and other Cannabinoids

| | | | | | | | | Ratio of | Ratio of | Ratio of |
|---|---|---|---|---|---|---|---|---|---|---|
| Sample ID | | | Olivetolic | | | | | CBDa to | CBDa to | CBDa to |
| in the | | Olivetol | Acid | CBGa | THCa | CBDa | | [THCa + | [CBGa + | upstream |
| figure | Strain | (mg/L) | (mg/L) | (mg/L) | (mg/L) | (mg/L) | OD600 | CBDa] | CBDa] | metabolites |
| OXC154 | HB2010 | 57.729 | 91.475 | 7.507 | 0.493 | 6.282 | 3.422 | 0.949 | 0.53 | 0.043 |
| RFP | HB1741 | 70.825 | 67.6 | 19.1 | 0 | 0 | 3.845 | — | 0 | 0 |
| mScarlet | | | | | | | | | | |
| PLT1504- | OXC154- | 60.267 | 99.1 | 0.9 | 1.533 | 21.7 | 3.355 | 0.934 | 0.96 | 0.137 |
| H11 | R3G(=GGG)/ | | | | | | | | | |
| | L21G/S60T/ | | | | | | | | | |
| | S88A(=GCT) | | | | | | | | | |
| PLT1504- | OXC154- | 45.167 | 70.633 | 1.667 | 1.6 | 20.567 | 3.169 | 0.928 | 0.925 | 0.175 |
| C8 | R3G(=GGG)/ | | | | | | | | | |
| | A18E/T49R/S60T/ | | | | | | | | | |
| | S88A(=GCT) | | | | | | | | | |
| PLT1504- | OXC154- | 51.883 | 84.05 | 1.933 | 1.567 | 20.033 | 3.298 | 0.927 | 0.915 | 0.145 |
| F12 | R3T/T49R/ | | | | | | | | | |
| | S88A(=GCC) | | | | | | | | | |
| PLT1505- | OXC154- | 38.167 | 57.7 | 3.767 | 1.4 | 19.933 | 3.114 | 0.934 | 0.841 | 0.201 |
| D11 | R3W/A18E/T49R/ | | | | | | | | | |
| | S60T/S88A | | | | | | | | | |
| | (=GCT) | | | | | | | | | |
| PLT1505- | OXC154- | 35.233 | 58 | 2.533 | 1.433 | 19.067 | 3.325 | 0.93 | 0.883 | 0.199 |
| C9 | R3V/T49R/S60T/ | | | | | | | | | |
| | S88A(=GCT) | | | | | | | | | |
| PLT1505- | OXC154- | 46.85 | 72.533 | 2.517 | 1.467 | 19.033 | 3.461 | 0.929 | 0.88 | 0.159 |
| H5 | R3V/T49R/S60T/ | | | | | | | | | |
| | S88A(=GCC) | | | | | | | | | |
| PLT1504- | OXC154- | 60.8 | 96.933 | 4.7 | 1.333 | 18.733 | 3.403 | 0.935 | 0.798 | 0.116 |
| G7 | A18A(=GCC) | | | | | | | | | |
| PLT1504- | OXC154- | 43.6 | 74.767 | 1.733 | 1.433 | 18.133 | 3.17 | 0.927 | 0.914 | 0.152 |
| E3 | R3T/A18E/T49R/ | | | | | | | | | |
| | S88A(=GCC) | | | | | | | | | |
| PLT1505- | OXC154-R3T/ | 34.8 | 56.267 | 3.567 | 1.367 | 18.1 | 3.21 | 0.93 | 0.837 | 0.192 |
| B8 | S88A(=GCC) | | | | | | | | | |
| PLT1505- | OXC154- | 33.9 | 57.2 | 2.133 | 1.3 | 17.7 | 2.94 | 0.932 | 0.895 | 0.191 |
| B9 | R3G(=GGG)/ | | | | | | | | | |
| | L21G/T49R | | | | | | | | | |
| PLT1504- | OXC154- | 44.233 | 70.1 | 3 | 1.4 | 17.333 | 2.995 | 0.925 | 0.851 | 0.15 |
| C11 | R3T/T49R/ | | | | | | | | | |
| | S88A(=GCT) | | | | | | | | | |
| PLT1504- | OXC154- | 53.833 | 86.667 | 6.933 | 1.3 | 17.3 | 3.389 | 0.933 | 0.744 | 0.123 |
| F5 | R3G(=GGA)/ | | | | | | | | | |
| | A18E/T49R/S60T/ | | | | | | | | | |
| | S88A(=GCC) | | | | | | | | | |
| PLT1506- | OXC154-R3W/T49R/ | 47.433 | 83.2 | 2.433 | 1.233 | 17.2 | 3.44 | 0.933 | 0.877 | 0.129 |
| C5 | S88A(=GCC)/V97E | | | | | | | | | |
| PLT1505- | OXC154- | 53.267 | 90.667 | 1.1 | 1.2 | 16.867 | 3.619 | 0.934 | 0.938 | 0.116 |
| F12 | R3G(=GGG)/ | | | | | | | | | |
| | A18E/S88A(=GCC) | | | | | | | | | |
| PLT1504- | OXC154- | 42.967 | 73.433 | 1.6 | 1.3 | 16.333 | 3.09 | 0.927 | 0.905 | 0.14 |
| D6 | R3V/A18E/T49R/ | | | | | | | | | |
| | S60T/S88A(=GCC) | | | | | | | | | |
| PLT1504- | OXC154- | 47.25 | 74.95 | 3.233 | 1.25 | 16.267 | 3.362 | 0.93 | 0.83 | 0.134 |
| A2 | S60T/S88A(=GCC) | | | | | | | | | |
| PLT1505- | OXC154- | 49.9 | 85.433 | 0.433 | 1.2 | 16.167 | 3.594 | 0.932 | 0.973 | 0.121 |
| E11 | R3T/A18E/T49R/ | | | | | | | | | |
| | S60T/S88A(=GCT) | | | | | | | | | |
| PLT1505- | OXC154-R3W/ | 35.267 | 61.267 | 2.033 | 1.267 | 16 | 2.996 | 0.927 | 0.883 | 0.164 |
| F9 | L21G/T49R/ | | | | | | | | | |
| | S88A(=GCC)/ | | | | | | | | | |
| | V97E | | | | | | | | | |
| PLT1506- | OXC154- | 64.067 | 109.767 | 2.133 | 0.933 | 15.8 | 3.446 | 0.946 | 0.867 | 0.091 |
| A2 | R3T/A18E/ | | | | | | | | | |
| | T49R/S60T | | | | | | | | | |
| PLT1504- | OXC154- | 47.167 | 76.533 | 7.767 | 1.167 | 15.533 | 3.434 | 0.936 | 0.685 | 0.122 |
| D12 | P2W/T26A/S60T | | | | | | | | | |
| PLT1505- | OXC154- | 35.8 | 66.333 | 1.967 | 1.167 | 15.367 | 3.158 | 0.93 | 0.88 | 0.152 |
| B11 | R3G(=GGG)/ | | | | | | | | | |
| | L21G/S60T/ | | | | | | | | | |
| | S88A(=GCC)/ | | | | | | | | | |
| | V97E | | | | | | | | | |
| PLT1505- | OXC154- | 47.483 | 69.983 | 4.95 | 1.1 | 15.333 | 3.273 | 0.935 | 0.737 | 0.122 |
| G11 | R3G(=GGG)/A18E/ | | | | | | | | | |
| | T49R/S88A(=GCC) | | | | | | | | | |
| PLT1506- | OXC154- | 49.4 | 88.367 | 1.2 | 1.133 | 15.233 | 3.522 | 0.932 | 0.924 | 0.11 |
| A10 | R3T/L21G/S60T/ | | | | | | | | | |
| | S88A(=GCC)/ | | | | | | | | | |
| | V97D | | | | | | | | | |
| PLT1505- | OXC154- | 51.017 | 89.717 | 2.217 | 1.15 | 15.033 | 3.498 | 0.93 | 0.867 | 0.105 |
| H3 | P2W/L21G/T49R/ | | | | | | | | | |
| | S88A(=GCC)/ | | | | | | | | | |
| | V97E | | | | | | | | | |
| PLT1505- | OXC154- | 50.6 | 84.4 | 3.1 | 1.033 | 14.567 | 3.511 | 0.934 | 0.813 | 0.108 |
| H2 | R3G(=GGG)/ | | | | | | | | | |
| | L21G/T49R/ | | | | | | | | | |
| | S88A(=GCT) | | | | | | | | | |
| PLT1506- | OXC154- | 47.933 | 86.617 | 1.117 | 1.05 | 14.267 | 3.466 | 0.932 | 0.924 | 0.105 |
| C4 | S295S(=TCA) | | | | | | | | | |
| PLT1506- | OXC154- | 39.6 | 66.333 | 0.967 | 0.933 | 14 | 3.279 | 0.938 | 0.934 | 0.132 |
| A8 | R3V/L21G/S60T/ | | | | | | | | | |
| | S88A(=GCC) | | | | | | | | | |
| PLT1505- | OXC154- | 54.733 | 91.767 | 2.133 | 1.067 | 14 | 3.304 | 0.931 | 0.863 | 0.092 |
| F2 | R3T/A18E/ | | | | | | | | | |
| | S88A(=GCC) | | | | | | | | | |
| PLT1504- | OXC154-S60T/ | 49.833 | 88.733 | 2.833 | 1.033 | 13.9 | 3.045 | 0.932 | 0.824 | 0.097 |
| E2 | S88A(=GCT) | | | | | | | | | |
| PLT1506- | OXC154- | 49.767 | 88.367 | 2.583 | 1 | 13.8 | 3.437 | 0.934 | 0.833 | 0.103 |
| H2 | R3W/T49R/ | | | | | | | | | |
| | S88A(=GCT) | | | | | | | | | |
| PLT1505- | OXC154-T49R/ | 46.5 | 73.833 | 2.167 | 0.833 | 13.7 | 3.112 | 0.951 | 0.86 | 0.123 |
| A6 | S88A(=GCC) | | | | | | | | | |
| PLT1506- | OXC154- | 48.733 | 86.433 | 2.833 | 0.967 | 13.567 | 3.446 | 0.933 | 0.832 | 0.102 |
| F10 | R3W/S47F | | | | | | | | | |
| PLT1508- | OXC154- | 48.856 | 82.156 | 2.167 | 1.1 | 13.333 | 3.458 | 0.925 | 0.854 | 0.101 |
| H10 | A347G/I372L/ | | | | | | | | | |
| | L451G | | | | | | | | | |
| PLT1505- | OXC154- | 49.133 | 85.4 | 4.633 | 0.867 | 13.3 | 3.389 | 0.941 | 0.748 | 0.096 |
| E9 | R3G(=GGG)/ | | | | | | | | | |
| | L21G/S60T | | | | | | | | | |
| PLT1506- | OXC154- | 44.433 | 82.6 | 1.9 | 0.9 | 13.3 | 3.5 | 0.937 | 0.867 | 0.104 |
| C10 | R3T/L21G/T49R/ | | | | | | | | | |
| | S88A(=GCT) | | | | | | | | | |
| PLT1506- | OXC154- | 46.467 | 84.867 | 1.033 | 0.967 | 13.3 | 3.41 | 0.932 | 0.925 | 0.101 |
| C4 | S295S(=TCA) | | | | | | | | | |
| PLT1506- | OXC154- | 51.367 | 88.85 | 1.85 | 0.967 | 13.2 | 3.44 | 0.932 | 0.873 | 0.093 |
| A3 | R3W/L21G/ | | | | | | | | | |
| | S88A(=GCT) | | | | | | | | | |
| PLT1506- | OXC154- | 42.4 | 78.389 | 1.456 | 0.967 | 12.944 | 3.351 | 0.931 | 0.893 | 0.106 |
| D11 | L21G/T49R/S60T/ | | | | | | | | | |
| | S88A(=GCT) | | | | | | | | | |
| PLT1507- | OXC154- | 43.667 | 68.7 | 8.467 | 0.933 | 12.733 | 3.437 | 0.932 | 0.599 | 0.105 |
| B11 | A347G/A383V | | | | | | | | | |
| PLT1505- | OXC154- | 48.133 | 86.467 | 1.367 | 0.867 | 12.7 | 3.307 | 0.936 | 0.904 | 0.094 |
| A9 | R3W/L21G/T49R/ | | | | | | | | | |
| | S60T/S88A(=GCT) | | | | | | | | | |
| PLT1505- | OXC154-A18E/ | 50.367 | 90.933 | 3.4 | 0.9 | 12.667 | 3.382 | 0.935 | 0.774 | 0.087 |
| E12 | S88A(=GCC) | | | | | | | | | |
| PLT1506- | OXC154- | 42.633 | 77.233 | 2.467 | 0.8 | 12.4 | 3.439 | 0.939 | 0.832 | 0.103 |
| H9 | R3W/L21G/T49R | | | | | | | | | |
| PLT1508- | OXC154- | 49.933 | 83.3 | 3.267 | 0.967 | 12.4 | 3.405 | 0.927 | 0.783 | 0.093 |
| E1 | A347G/L451G | | | | | | | | | |
| PLT1507- | OXC154- | 45.733 | 74.717 | 1.967 | 1.033 | 12.383 | 3.511 | 0.923 | 0.862 | 0.102 |
| F10 | A347G/I372L/ | | | | | | | | | |
| | A383V/L451G | | | | | | | | | |
| PLT1508- | OXC154- | 43.2 | 71 | 4.567 | 0.833 | 12.267 | 3.508 | 0.937 | 0.732 | 0.103 |
| F7 | I372L/A383V/L451G | | | | | | | | | |
| PLT1506- | OXC154- | 45.333 | 83.1 | 1.467 | 0.8 | 12.267 | 3.135 | 0.939 | 0.893 | 0.095 |
| A11 | R3V/T49R/ | | | | | | | | | |
| | S88A(=GCT) | | | | | | | | | |
| PLT1504- | OXC154- | 45.2 | 74.2 | 10.833 | 0.7 | 11.667 | 3.276 | 0.944 | 0.513 | 0.089 |
| E5 | R3G(=GGG)/ | | | | | | | | | |
| | A18E/S60T | | | | | | | | | |
| PLT1508- | OXC154- | 48.733 | 89.3 | 3.6 | 0.8 | 11.533 | 3.486 | 0.934 | 0.752 | 0.081 |
| D10 | A347G/I372L/A383V | | | | | | | | | |
| PLT1505- | OXC154-R3T | 65.925 | 65.55 | 0.175 | 0.65 | 11.4 | 3.832 | 0.952 | 0.977 | 0.086 |
| B2 | | | | | | | | | | |
| PLT1505- | OXC154-R3V/ | 34.1 | 57.933 | 8.933 | 0.733 | 11.167 | 3.039 | 0.938 | 0.557 | 0.11 |
| G1 | A18E/T49R/V97E | | | | | | | | | |
| PLT1505- | OXC154- | 34.467 | 62.333 | 7.567 | 0.7 | 11.033 | 3.216 | 0.945 | 0.598 | 0.105 |
| G3 | R3T/L21G/T49R/ | | | | | | | | | |
| | S60T/S88A(=GCT) | | | | | | | | | |
| PLT1504- | OXC154- | 44.267 | 73.033 | 11.633 | 0.667 | 10.8 | 3.106 | 0.942 | 0.478 | 0.085 |
| F6 | R3T/L21G/T49R/ | | | | | | | | | |
| | V97E | | | | | | | | | |
| PLT1505- | OXC154- | 43.333 | 77.667 | 1.567 | 0.75 | 10.617 | 3.307 | 0.945 | 0.799 | 0.082 |
| E3 | R3V/L21G/T49R/ | | | | | | | | | |
| | S60T | | | | | | | | | |
| PLT1509- | OXC154- | 51.6 | 85.6 | 6.2 | 0.6 | 10.333 | 3.723 | 0.945 | 0.626 | 0.073 |
| A6 | G351I/I372L | | | | | | | | | |
| PLT1508- | OXC154- | 48.767 | 86.433 | 4.167 | 0.8 | 10.267 | 3.531 | 0.928 | 0.713 | 0.074 |
| E5 | G351I/A383V/ | | | | | | | | | |
| | L451G | | | | | | | | | |
| PLT1508- | OXC154- | 70.7 | 50.15 | 1.325 | 0 | 9.675 | 3.948 | 1 | 0.863 | 0.08 |
| F5 | G351R/I372L/ | | | | | | | | | |
| | L451G | | | | | | | | | |
| PLT1509- | OXC154- | 71.683 | 54.975 | 2.05 | 0.067 | 8.283 | 3.626 | 0.994 | 0.8 | 0.064 |
| A10 | G351I/I372L/ | | | | | | | | | |
| | A383V/L451G | | | | | | | | | |
| PLT1508- | OXC154- | 66.34 | 51.085 | 2.87 | 0.175 | 7.875 | 3.676 | 0.982 | 0.729 | 0.064 |
| A10 | G351R/I372L/ | | | | | | | | | |
| | A383V/L451G | | | | | | | | | |
| PLT1507- | OXC154- | 71.125 | 61.175 | 4.45 | 0 | 7.675 | 3.621 | 1 | 0.635 | 0.056 |
| E8 | G3511/I372L/ | | | | | | | | | |
| | A383V | | | | | | | | | |
| PLT1507- | OXC154- | 65.525 | 57.525 | 5.4 | 0 | 7.45 | 3.642 | 1 | 0.575 | 0.058 |
| B8 | N331G/Q349G/ | | | | | | | | | |
| | I372L/L451G | | | | | | | | | |
| PLT1508- | OXC154-G351R/ | 66.7 | 52.975 | 4.6 | 0 | 6.475 | 3.875 | 1 | 0.583 | 0.052 |
| A6 | A383V/L451G | | | | | | | | | |
| PLT1508- | OXC154-Q349G/ | 72.6 | 48.375 | 4.975 | 0 | 6.325 | 3.885 | 1 | 0.555 | 0.05 |
| H4 | A383V/L451G | | | | | | | | | |
| PLT1507- | OXC154- | 66.1 | 55.375 | 6.175 | 0 | 6.25 | 3.752 | 1 | 0.492 | 0.049 |
| E9 | A383V/L451G | | | | | | | | | |
| PLT1507- | OXC154- | 73.375 | 63.25 | 7.375 | 0 | 6.2 | 3.847 | 1 | 0.459 | 0.043 |
| E12 | N331G/Q349G | | | | | | | | | |
| PLT1507- | OXC154- | 70.375 | 59.625 | 7.45 | 0 | 6.025 | 3.825 | 1 | 0.443 | 0.043 |
| B3 | G351I | | | | | | | | | |
| PLT1509- | OXC154- | 76.2 | 56.45 | 7.1 | 0 | 5.925 | 3.513 | 1 | 0.469 | 0.042 |
| A11 | L451G | | | | | | | | | |
| PLT1507- | OXC154- | 48.35 | 41.8 | 8.35 | 0 | 1.925 | 3.694 | 1 | 0.155 | 0.02 |
| H7 | N331G/G351I/ | | | | | | | | | |
| | I372L/A383V | | | | | | | | | |

[0234] Table 8 provides a summary of mutations described herein, with additional mutations being described in Table 15, below.

TABLE 8
Mutations

| | | Number of occurrences |
|---|---|---|
| | | in SEQ ID NO: 72 to |
| Mutation | Type | SEQ ID NO: 139 |
| P2W | Non-conservative | 2 |
| R3T | Non-conservative | 12 |
| R3G(=GGG) | Non-conservative | 9 |
| R3G(=GGA) | Non-conservative | 1 |
| R3W | Non-conservative | 8 |
| R3V | Non-conservative | 7 |
| A18E | Non-conservative | 13 |
| A18A(=GCC) | Non-conservative | 1 |
| L21G | Conservative | 17 |
| T26A | Non-conservative | 1 |
| N331G | Non-conservative | 3 |
| S47F | Non-conservative | 1 |
| T49R | Non-conservative | 28 |
| S60T | Conservative | 21 |
| S88A(=GCC) | Non-conservative | 18 |
| S88A(=GCT) | Non-conservative | 15 |
| V97E | Non-conservative | 6 |
| V97D | Non-conservative | 1 |
| S295S(=TCA) | Conservative | 2 |
| A347G | Conservative | 5 |
| Q349G | Non-conservative | 3 |
| G351I | Conservative | 6 |
| G351R | Non-conservative | 3 |
| I372L | Conservative | 11 |
| A383V | Conservative | 12 |
| L451G | Conservative | 13 |

[0235] Use in Host Cells

[0236] Phytocannabinoids, such as tetrahydrocannabinol (THC) and cannabidiol (CEO), can be extracted from plant material for medical and psychotropic purposes. However, the synthesis of plant material is costly, not readily scalable to large volumes, and requires lengthy growth periods to produce sufficient quantities of phytocannabinoids. An organism capable of fermentation, such as Saccharomyces cerevisiae, that is capable of producing cannabinoids would provide an economical route to producing these compounds on an industrial scale.

[0237] The early stages of the cannabinoid pathway proceeds via the generation of olivetolic acid by the type III PKS olivetolic acid synthase (OAS) and cyclase olivetolic acid cyclase (OAC). This reaction uses a hexanoyl-CoA starter as well as three units of malonyl-CoA. Olivetolic acid is the backbone of most classical cannabinoids and can be prenylated to form CBGA, which is ultimately converted to CBDA or THCA by an oxidocyclase. Downstream phytocannabinoids can be prepared therefrom, and CBDa synthase activity based on the OXC154 variants described herein is envisioned for use in host cells.

[0238] Table 9 lists specific examples of host cell organisms in which the described cannabidiolic acid synthase (CBDa synthase) OXC154 variants may be utilized for preparation of cannabinoids in the described pathways.

TABLE 9
List of Host Cell Organisms

| Type | Organisms |
|---|---|
| Bacteria | Escherichia coli, Streptomyces coelicolor and other species., Bacillus |
| | subtilis, Mycoplasma genitalium, Synechocytis, Zymomonas mobilis, |
| | Corynebacterium glutamicum, Synechococcus sp., Salmonella typhi, |
| | Shigella flexneri, Shigella sonnei, and Shigella disenteriae, Pseudomonas |
| | putida, Pseudomonas aeruginosa, Pseudomonas mevalonii, Rhodobacter |
| | sphaeroides, Rhodobacter capsulatus, Rhodospirillum rubrum, |
| | Rhodococcus sp. |
| Fungi | Saccharomyces cerevisiae, Ogataea polymorpha, Komagataella phaffii, |
| | Kluyveromyces lactis, Neurospora crassa, Aspergillus niger, Aspergillus |
| | nidulans, Schizosaccharomyces pombe, Yarrowia lipolytica, |
| | Myceliophthora thermophila, Aspergillus oryzae, Trichoderma reesei, |
| | Chrysosporium lucknowense, Fusarium sp., Fusarium gramineum, |
| | Fusarium venenatum, Pichia finlandica, Pichia trehalophila, Pichia |
| | koclamae, Pichia membranaefaciens, Pichia opuntiae, Pichia |
| | thermotolerans, Pichia salictaria, Pichia guercuum, Pichia pijperi, Pichia |
| | stipitis, Pichia methanolica, Hansenula polymorpha. |
| Protists | Chlamydomonas reinhardtii, Dictyostelium discoideum, Chlorella sp., |
| | Haematococcus pluvialis, Arthrospira platensis, Dunaliella sp., |
| | Nannochloropsis oceanica. |
| Plants | Cannabis sativa, Arabidopsis thaliana, Theobroma cacao, maize, banana, |
| | peanut, field peas, sunflower, Nicotiana sp., tomato, canola, wheat, barley, |
| | oats, potato, soybeans, cotton, sorghum, lupin, rice. |

[0239] Phytocannabinoids may be produced in a host cell involving Dictyostelium discoideum polyketide synthase (DiPKS), olivetolic acid cyclase (OAC), prenyltransferases, and/or mutants of these, as described in Applicant's co-pending International Application No: PCT/CA2020/050687 (herein incorporated by reference). For example, a host cell transformed with a polyketide synthase coding sequence, an olivetolic acid cyclase coding sequence, and a prenyltransferase coding sequence may be prepared. The polyketide synthase and the olivetolic acid cyclase catalyze synthesis of olivetolic acid from malonyl CoA. The cannabidiolic acid (CBDa) synthase may include any of the functional mutants described herein. The host cell may include a yeast cell, a bacterial cell, a protest cell or a plant cell, selected from among those listed in Table 9.

[0240] Combinations of the methods, nucleotides, and expression vectors described herein as well as in Applicant's co-pending International Application No: PCT/CA2020/050687 may be employed together to produce CBDa, as well as other phytocannabinoids and phytocannabinoid precursors. Depending on the desired product, selections of characteristics of the cells and methods employed may be selected to achieve production of the cannabinoid, cannabinoid precursor, or intermediate of interest. For example, cannabivarins may be produced.

[0241] Methods of producing a phytocannabinoid may comprising culturing a host cell under suitable culture conditions to form a phytocannabinoid, said host cell comprising: a polynucleotide encoding a polyketide synthase (PKS) enzyme; a polynucleotide encoding an olivetolic acid cyclase (OAC) enzyme mutants as described herein; and a polynucleotide encoding a prenyltransferase (PT) enzyme; and optionally comprising: a polynucleotide encoding an acyl-CoA synthetase (Alk) enzyme; a polynucleotide encoding a fatty acyl CoA activating (CsAAE) enzyme; and/or a polynucleotide encoding a THCa synthase (OXC) enzyme.

[0242] An expression vector can be prepared comprising a polynucleotide encoding a polyketide synthase (PKS) enzyme; a polynucleotide encoding an olivetolic acid cyclase (OAC) enzyme mutants as described herein; and a polynucleotide encoding a prenyltransferase (PT) enzyme. The expression vector can optionally comprise a polynucleotide encoding an acyl-CoA synthetase (Alk) enzyme; a polynucleotide encoding an acyl-activating enzyme CsAAE1; and/or a polynucleotide encoding a THCa synthase (OXC) enzyme.

### Example 2

[0243] Set of CBDa Producing OXC Mutants Derived from OXC161

[0244] OXC161 is an OXC154 mutant as described in Example 1 (SEQ ID NO:59 (DNA) and SEQ ID NO:127 (AA)). Wild type cannabidiolic acid synthase (CBDa synthase), having been modified with the insertion of a serine between positions 224 and 225 in the OXC52 sequence, results in OXC154, a modified cannabidiolic acid synthase with improved CBDa production as compared with OXC52. OXC154 is described in Applicant's publication WO202/0232553 (PCT application PCT/CA2020/050687). Variants of OXC154, termed “OXC161”, and its mutants having CBDa synthase activity are prepared.

[0245] Materials and Methods:

[0246] Genetic Manipulations in the directed evolution of OXC. Genetic manipulations where conducted according to the same methodology as in Example 1, with the exception that OXC161 (SEQ ID NO:59) was used as the template plasmid for mutagenesis in place of OXC154. Modifications made to base strains for Examples 2-5 are outlined in Table 14, below, and point substitutions described in Examples 2-4, wherein amino acid position numbers refer to the OXC154 sequence, are provided in Table 15 below.

[0247] Strain growth and Media. Same as in Example 1.

[0248] Quantification Protocol. Same as in Example 1.

[0249] Results:

[0250] Production of Cannabidiolic Acid. Clonal strains harboring a library of mutant OXC161 (OXC154-G351 l/A383V/L451G) variants were expressed on plasmids under control of pGAL1 in a CBGa-producing background (HB2191). Comparison with strains expressing OXC161(HB2522) and a non-catalytic control mScarlet (HB2523) facilitated the identification of novel OXC variants with improved activity.

[0251] FIG. 6 shows cannabinoid production values in strains containing expressing OXC161 variants identified through a combinatorial library.

[0252] Table 10 shows production of C:Da and upstream metabolites observed in this example.

TABLE 10
Production of CBDa and Upstream Metabolites

| | | | | | | | | Ratio of | Ratio of | Ratio of |
|---|---|---|---|---|---|---|---|---|---|---|
| Sample ID | | | Olivetolic | | | | | CBDa to | CBDa to | CBDa to |
| in the | | Olivetol | Acid | CBGa | THCa | CBDa | | (THCa + | (CBGa + | upstream |
| figure | Strain | (mg/L) | (mg/L) | (mg/L) | (mg/L) | (mg/L) | OD600 | CBDa) | CBDa) | metabolites |
| HB2522 | OXC154- | 18.667 | 54.833 | 40.500 | 4.500 | 14.500 | 3.368 | 0.763 | 0.265 | 0.088 |
| | G351I/A383V/ | | | | | | | | | |
| | L451G | | | | | | | | | |
| HB2523 | mScarlet | 18.500 | 44.667 | 67.667 | 0.000 | 0.000 | 3.256 | | 0.000 | 0.000 |
| PLT1676- | OXC154- | 29.833 | 92.000 | 30.000 | 7.500 | 37.167 | 3.720 | 0.832 | 0.555 | 0.157 |
| B8 | R3G/A18E/S60T/ | | | | | | | | | |
| | G351I/A383V/ | | | | | | | | | |
| | L451G | | | | | | | | | |
| PLT1675- | OXC158 (OXC154- | 22.167 | 63.500 | 31.500 | 8.667 | 33.333 | 3.381 | 0.794 | 0.516 | 0.189 |
| C8 | R3W/A18E/T49R/ | | | | | | | | | |
| | V97E/G351I/A383V/ | | | | | | | | | |
| | L451G) | | | | | | | | | |
| PLT1675- | OXC154- | 23.167 | 86.667 | 27.167 | 7.167 | 32.500 | 3.432 | 0.819 | 0.546 | 0.154 |
| D3 | R3W/A18E/T49R/ | | | | | | | | | |
| | V97E/G351I/A383V/ | | | | | | | | | |
| | L451G | | | | | | | | | |
| PLT1675- | OXC154- | 17.667 | 60.167 | 8.000 | 8.500 | 31.000 | 3.357 | 0.785 | 0.796 | 0.223 |
| F10 | R3T/S60T/G351I/ | | | | | | | | | |
| | A383V/L451G | | | | | | | | | |

### Example 3

[0253] Set of CBDa Producing OXC Mutants Derived from OXC158

[0254] Wild type cannabidiolic acid synthase (OXC52 of 523 amino acids in length, represented herein as SEQ ID NO:140), when modified with the insertion of a serine between positions 224 and 225 is referred to herein as OXC154 (OXC154 being 524 amino acids in length, as represented here in as SEQ ID NO:141). In Example 2, OXC161 is formed, as derived from OXC154. In this example, OXC158 is formed as an OXC161 mutant. OXC158 may be referenced herein interchangeably with SEQ ID NO:162 (protein), and noting that SEQ ID NO:158 represents the DNA therefor, which may also be referenced as OXC154-R3W/A18E/T49R/V97E/G351I/A383V/L451G, representing the substitutions relative to the amino acids of OXC154 (with OXC154 being represented herein as SEQ ID:141). CBDa producing cannabidiolic acid synthase mutants of OXC158 are described with reference to the substitution positions relative to OXC154 (SEQ ID NO:141), or relative to OXC158 (SEQ ID NO:162), if so specified.

[0255] Materials and Methods:

[0256] Genetic Manipulations. Site-saturation mutagenesis libraries were constructed using the same kinase-ligase-Dpnl methods described in Example 1. OXC158 was used as the parental template sequence. Plasmid transformations into yeast cells were performed as described in Example 1. Modifications made to base strains for Examples 2-5 are outlined in Table 14, below, and point substitutions described in Examples 2-4, wherein amino acid position numbers refer to the OXC154 sequence, are provided in Table 15 below.

[0257] Strain Growth and Media. Library colonies were picked and grown in 300 μl of preculture media in a 96-well deepwell plate. The plate was incubated at 30° C. and shaken at 950 rpm for 22 hours. Next, 50 μl of incubated preculture was removed from each well and mixed into a new 96-well deepwell plate filled with 450 μl of macronutrient medium. The new plate was incubated at 30° C. and shaken at 950 rpm for 20 hours. Finally, 55 μl of feeding media was added into each plate well, and the incubation was continued for another 72 hours.

[0258] Metabolite extraction was performed by adding 30 μl of culture to 270 μl of 56% acetonitrile in a new 96-well microtiter plate. The solutions were mixed thoroughly, then centrifuged at 3750 rpm for 10 mins. The soluble layer was removed and diluted with 56% acetonitrile to an appropriate concentration in a 96-well v-bottom microtiter plate. Samples were stored at −20° C. until analysis.

[0259] All culturing steps, metabolites extraction, and assays were carried out in 96-well plate format. The media used in this screening protocol is defined below.

[0260] Preculture Media. Preculture media is composed of 1.7 g/L YNB without ammonium sulfate and amino acid, 1.92 g/L URA dropout amino acid supplement, 0.375 g/L hemimagnesium L-glutamate, with 1% w/v glucose.

[0261] Macronutrient Media. Macronutrient media contains 1.7 g/L YNB without ammonium sulfate and amino acid, 1.92 g/L URA dropout amino acid supplement, 1.5 g/L hemimagnesium L-glutamate, 2.5 g/L yeast extracts, with 2% w/v glucose.

[0262] Feeding Media. Feeding media contains 10 g/L KH₂PO₄, 20 g/L MgSO₄ heptahydrate, 19.4 g/L URA dropout amino acid supplement, 17 g/L hemimagnesium L-glutamate, 0.76 g/L uracil, 2% w/v glucose, 38% w/v galactose with 0.1% v/v vitamins supplement, and 1% v/v trace elements. Vitamin and trace elements solutions were prepared according to the protocol of van Hoek et al. (2000).

[0263] Quantification Protocol. Same as in Example 1.

[0264] Results:

[0265] Production of CBDa. Clonal strains harboring a library of mutant OXC158 variants were expressed on plasmids under control of pGAL1 in an CBGa-producing background (HB2652). Comparison with strains expressing OXC158(HB2736) and a non-catalytic control mScarlet (HB2737) facilitated the identification of novel OXC variants with improved activity. FIG. 7 shows cannabinoid production values.

[0266] Table 11 shows production of CBDa and upstream metabolites observed in this example.

TABLE 11
Production of CBDa and Upstream Metabolites

| | | | | | | | | Ratio of | Ratio of | Ratio of |
|---|---|---|---|---|---|---|---|---|---|---|
| Sample ID | | | Olivetolic | | | | | CBDa to | CBDa to | CBDa to |
| in the | | Olivetol | Acid | CBGa | THCa | CBDa | | (THCa + | (CBGa + | upstream |
| figure | Enzyme | (mg/L) | (mg/L) | (mg/L) | (mg/L) | (mg/L) | OD600 | CBDa) | CBDa) | metabolites |
| HB2736 | OXC158 | 48.649 | 0.375 | 57.422 | 11.369 | 77.456 | 11.977 | 0.877 | 0.599 | 0.546 |
| HB2737 | mScarlet | 43.204 | 0.902 | 135.105 | 4.143 | 13.033 | 11.894 | 0.769 | 0.112 | |
| PLT1755- | OXC158- | 57.944 | 2.641 | 16.448 | 21.052 | 136.273 | 12.321 | 0.866 | 0.895 | 1.011 |
| H11 | I351G | | | | | | | | | |
| PLT1759- | OXC158- | 55.476 | 2.992 | 24.093 | 19.318 | 125.396 | 12.056 | 0.867 | 0.840 | 0.908 |
| E8 | S367R | | | | | | | | | |
| PLT1745- | OXC158- | 56.839 | 5.923 | 24.792 | 22.330 | 124.016 | 10.625 | 0.847 | 0.835 | 0.847 |
| H2 | Q274G | | | | | | | | | |
| PLT1755- | OXC158- | 56.165 | 5.093 | 17.535 | 20.320 | 122.355 | 11.650 | 0.858 | 0.876 | 0.898 |
| H8 | I351M | | | | | | | | | |
| PLT1762- | OXC158- | 54.780 | 4.918 | 10.877 | 20.917 | 121.047 | 12.542 | 0.853 | 0.918 | 0.958 |
| F6 | V383A | | | | | | | | | |
| PLT1759- | OXC158- | 49.135 | 4.704 | 14.729 | 18.550 | 119.581 | 12.343 | 0.866 | 0.892 | 1.004 |
| G8 | S367Q | | | | | | | | | |
| PLT1759- | OXC158- | 53.155 | 4.555 | 10.917 | 18.757 | 119.130 | 12.659 | 0.864 | 0.917 | 0.968 |
| F10 | S367N | | | | | | | | | |
| PLT1759- | OXC158- | 54.225 | 4.797 | 18.847 | 18.795 | 117.949 | 12.370 | 0.863 | 0.865 | 0.888 |
| G11 | S367R | | | | | | | | | |

### Example 4

[0267] Set of CBDa Producing OXC158 Mutants

[0268] In this example, an additional set of CBDa producing OXC158 enzyme mutants, derived from combinatorial expression of the single-site mutations identified in Example 3 are prepared.

[0269] Materials and Methods:

[0270] Genetic Manipulations. Similar methods were used for combinatorial mutant library construction as the Multiple Double-Strand Fragment methods described in Examples 1 and 2. However, some modifications were made to facilitate genomic integration of variant sequences. Mutagenic fragments pertaining to a target mutation were amplified by using corresponding mutagenic primers that were designed to overlap with adjacent fragments. A second overlap-extension PCR was applied to assemble multiple mutagenic fragments in one pot. In addition, the target variant sequences were fused with 3′ and 5′ flanking sequences via an additional overlap-extension PCR to create variant cassettes. Cassettes were then used for integration into the yeast genome via CRISPR-Cas9 techniques (Reider et al., 2017). All DNA was transformed into background strains using the transformation protocol of Geitz & Woods (2006). Modifications made to base strains for Examples 2-5 are outlined in Table 14, below, and point substitutions described in Examples 2-4, wherein amino acid position numbers refer to the OXC154 sequence, are provided in Table 15 below.

[0271] Strain growth and Media. Same as in Example 3, with exception to the assay culture incubation time; to facilitate selection of earlier maturing OXas with improved activity, following addition of feeding media, incubation time before extraction was shortened to 48 hours.

[0272] Quantification Protocol. Same as in Example 1.

[0273] Results:

[0274] Production of Cannabidiolic Acid. Clonal strains harboring a library of OXC158 combinatorial mutant variants were expressed from pGAL1 following CRISPR-Cas9 mediated genomic integration in a CBGa-producing background (HB3423). Comparison with strains expressing OXC158 (HB3324) and a non-catalytic control, mScarlet (HB3325), facilitated the identification of novel OXC variants with improved activity.

[0275] FIG. 8 shows CDa production in strains expressing OXC158 variants identified through a combinatorial library.

[0276] Table 12 illustrates production of CDa and upstream metabolites observed in this example.

TABLE 12
Production of CBDa and Upstream Metabolites

| | | | | | | | | Ratio of | Ratio of | Ratio of |
|---|---|---|---|---|---|---|---|---|---|---|
| Sample ID | | | Olivetolic | | | | | CBDa to | CBDa to | CBDa to |
| in the | | Olivetol | Acid | CBGa | THCa | CBDa | | (THCa + | (CBGa + | upstream |
| figure | Enzyme | (mg/L) | (mg/L) | (mg/L) | (mg/L) | (mg/L) | OD600 | CBDa) | CBDa) | metabolites |
| HB3324 | OXC158 | 110.697 | 47.996 | 292.600 | 0.769 | 77.948 | 12.090 | 0.991 | 0.222 | 0.133 |
| HB3325 | mScarlet | 129.350 | 59.252 | 557.170 | 7.443 | 12.545 | 12.072 | 0.641 | 0.023 | 0.014 |
| 1916-B1 | OXC158- | 243.692 | 207.932 | 72.178 | 27.650 | 465.483 | 10.377 | 0.944 | 0.868 | 0.524 |
| | L31E/V383G | | | | | | | | | |
| 1916-B5 | OXC158- | 260.055 | 213.678 | 237.003 | 22.748 | 428.807 | 10.175 | 0.950 | 0.646 | 0.392 |
| | N138T/V383M/ | | | | | | | | | |
| | H515E | | | | | | | | | |
| 1912-B9 | OXC158- | 212.695 | 134.557 | 41.805 | 27.518 | 428.278 | 11.255 | 0.940 | 0.911 | 0.634 |
| | S367K/V383A/ | | | | | | | | | |
| | P513V | | | | | | | | | |
| 1913-D3 | OXC158-V383A | 230.635 | 195.887 | 39.027 | 27.087 | 421.032 | 10.466 | 0.940 | 0.915 | 0.518 |
| 1914-D9 | OXC158-W3A/ | 219.145 | 113.923 | 187.890 | 21.275 | 397.760 | 11.575 | 0.949 | 0.684 | 0.493 |
| | L31E/K226M/ | | | | | | | | | |
| | S367Q/V383M/ | | | | | | | | | |
| | S399G/P513V | | | | | | | | | |
| 1917-G2 | OXC158-W3A/ | 127.282 | 52.465 | 16.403 | 17.580 | 356.487 | 12.007 | 0.953 | 0.956 | 1.022 |
| | N5Q/I351G | | | | | | | | | |
| 1922-H2 | OXC158- | 127.065 | 55.217 | 46.430 | 15.100 | 354.057 | 12.067 | 0.959 | 0.884 | 0.918 |
| | I351G/V383A | | | | | | | | | |
| 1911-F1 | OXC158-L31E/ | 182.950 | 105.485 | 66.557 | 21.540 | 330.195 | 11.671 | 0.939 | 0.836 | 0.550 |
| | Q274G/S367K/ | | | | | | | | | |
| | V383A | | | | | | | | | |
| 1921-D7 | OXC158- | 110.537 | 38.502 | 35.362 | 14.725 | 313.932 | 12.249 | 0.955 | 0.900 | 1.006 |
| | W3A/I351G/ | | | | | | | | | |
| | V383A | | | | | | | | | |
| 1922-E5 | OXC158- | 114.370 | 51.158 | 32.588 | 14.737 | 312.425 | 12.489 | 0.955 | 0.906 | 0.917 |
| | W3A/N5Q/N28E/ | | | | | | | | | |
| | I351G/S367R/ | | | | | | | | | |
| | V383A | | | | | | | | | |

### Example 5

[0277] OXC Variants for the Production of CBDVa

[0278] Wild type cannabidiolic acid synthase (CBDa synthase or “OXC52” herein), when modified with the insertion of a serine between positions 224 and 225 in the OXC52 sequence, results in OXC154. OXC variants for the production of CBDVa are described herein.

### INTRODUCTION

[0279] Cannabidiolic acid synthase (CBDAS) predominantly utilizes cannabigerolic acid (CBGa) as substrate to form CBDa but it can also accept cannabigerovarinic acid (CBGVa) as a precursor to generate cannabidivarinic acid (CBDVa). CBDVa is thought to have a number of useful therapeutic applications such as the treatment of epilepsy and autism (Zamberletti et al., 2021).

[0280] FIG. 9 shows the cannabivarinic acid biosynthesis pathway in Cannabis sativa. CBDVa can be produced in a heterologous host by expressing an appropriate acyl-CoA synthetase, polyketide cyclase, polyketide synthase, prenyltransferase and oxidocyclase in the presence of butyric acid. Butyric acid may be supplied exogenously or produced directly in the host. The oxidocylases described in Examples 1-4 can be used to produce CBDVa in addition to CBDa

[0281] Materials and Methods:

[0282] Genetic Manipulations. HB42 was used as a base strain to develop all other strains in this experiment. CRISPR and DNA transformation protocols were done as described in Example 4. CBDVa producing strains were generated by genomic integration of type III PKS (PKS73, DNA SEQ ID NO:202), an acyl-activating enzyme (CsAAE1, DNA SEQ ID NO:201), a prenyltransferase (PT254-R2S, SEQ ID NO:155) and an oxidocyclase (OXC52 (AA SEQ ID NO:140), OXC154-S88A/L451G (AA SEQ ID NO:72) or OXC157 which is also referred to herein as: OXC154-R3G/A18E/S60T/G351I/A383V/L451G (AA SEQ ID NO:161; DNA SEQ ID NO:205 or 157) into an appropriate yeast background.

[0283] Strain growth and Media. Same as in Example 3, with exception to the assay culture feeding media and incubation time. Following macronutrient growth, feeding media supplemented with 5 mM butyric acid was added to each well and the culture was incubated at 30° C. and shaken at 950 rpm for 96 hours.

[0284] Quantification Protocol. The quantification of metabolites was performed using a Thermo Scientific Vanquish™ UHPLC-UV system. The chromatography and UV conditions are described below. Divarin (DIV) and divarinic acid (DIVa, the precursor to varinoid biosynthesis) were not separated on the UV chromatograms and are therefore considered as a single peak.

[0285] LC Conditions:

[0286] Column: Raptor Biphenyl 100×2.1 mm, 1.8 μm particle size (PN: 9309212)

[0287] Guard column: UltraShield UHPLC PreColumn Filter (PN: 24997)

[0288] Column temperature: 55° C.

[0289] Flow rate: 0.800 mL/min

[0290] Eluent A: Water+0.1% Formic Acid

[0291] Eluent B: ACN+0.1% Formic Acid

[0292] Gradient:

| Time (min) | % B | Flow rate (mL/min) |
|---|---|---|
| 0.00 | 35 | 0.800 |
| 0.30 | 35 | 0.800 |
| 2.30 | 70 | 0.800 |
| 2.30 | 98 | 0.800 |
| 2.50 | 98 | 0.800 |
| 2.50 | 35 | 0.800 |
| 3.40 | 35 | 0.800 |

[0293] UV Conditions:

[0294] Wavelength: 274 nm

[0295] Data collection rate: 4.0 Hz

[0296] Response time: 1.00 s

[0297] Peak width: 0.100 min

[0298] Detection parameters:

| Compound | Retention time (min) |
|---|---|
| DIV + DIVa | 0.530 |
| OVLa | 0.905 |
| OVL | 0.977 |
| CBDa | 2.552 |
| CBGa | 2.602 |
| THCa | 2.910 |
| CBDVa | 2.269 |
| CBGVa | 2.348 |
| THCVa | 2.677 |

[0299] Results:

[0300] Production of CBDVa

[0301] FIG. 10 shows the UV spectra of varinoid standards. FIG. 11 shows UV spectra for CBGVa control strain (HB3292, no oxidocyclase). FIG. 12 shows UV spectra CBDVa strain (HB3291). The presence of a peak at 2.269 minutes in the CBDVa strain (see FIG. 12), but not the CBGVa control (see FIG. 11) indicates the presence of CBDVa.

[0302] FIG. 13 shows CBDVa and intermediate products THCVa, CBGVa, DIV/DIVa in strains expressing OXC154 variants identified through a combinatorial library.

[0303] Table 13 shows CBDVa and intermediate products in strains expressing OXC154 variants identified through a combinatorial library.

TABLE 13
CBDVa and Intermediate Products in
Strains Expressing OXC154 Variants

| | Divarin/Divarinc acid | CBGVa | THCVa | CBDVa |
|---|---|---|---|---|
| strain ID | product (mg/L) | | | |
| HB3292 | 0.95 | 13.55 | 0 | 0 |
| HB3291 | 0 | 0 | 0 | 1.86 |
| HB3209 | 0 | 0 | 0.31 | 4.60 |
| HB3300 | 0.43 | 0 | 0 | 6.26 |

[0304] This example illustrates strains so modified are able to produce CBDVa and intermediate products in host cells transformed with a modified CBDa synthase protein according to the described method.

[0305] Table 14 shows modifications made to base strains in detail for Examples 2-5.

TABLE 14
List of strains described in Examples 2-5

| Strain # | Plasmid | Genotype/base strain | Notes | Example |
|---|---|---|---|---|
| HB2191 | none | A CBGa-producing Saccharomyces | Base strain for | 2 |
| | | cerevisiae strain, similar to HB965 in | OXC154 clib R2 | |
| | | example 1 | (SEQ ID NO: 141) | |
| HB2522 | PLAS-618 | Saccharomyces cerevisiae base strain | OXC161 (OXC154- | 2 |
| | | HB2191 | G351I/A383V/L451G) | |
| | | | (SEQ ID NO: 127) | |
| HB2523 | PLAS-416 | Saccharomyces cerevisiae base strain | mScarlet | 2 |
| | | HB2191 | | |
| PLT1676-B8 | PLAS-679 | Saccharomyces cerevisiae base strain | OXC154-R3G/A18E/ | 2 |
| | | HB2191 | S60T/G351I/A383V/L451G | |
| | | | (SEQ ID NO: 157) | |
| PLT1675-C8 | PLAS-680 | Saccharomyces cerevisiae base strain | OXC158 (OXC154- | 2 |
| | | HB2191 | R3W/A18E/T49R/V97E/G351I/ | |
| | | | A383V/L451G) | |
| | | | (DNA: SEQ ID NO: 159) | |
| PLT1675-D3 | PLAS-681 | Saccharomyces cerevisiae base strain | OXC154- | 2 |
| | | HB2191 | R3W/A18E/T49R/V97E/G351I/ | |
| | | | A383V/L451G | |
| | | | (DNA: SEQ ID NO: 159) | |
| PLT1675-F10 | PLAS-682 | Saccharomyces cerevisiae base strain | OXC154-R3T/S60T/ | 2 |
| | | HB2191 | G3511/A383V/L451G | |
| | | | (SEQ ID NO: 160) | |
| HB2652 | none | A CBGa-producing Saccharomyces | Base strain for | 3 |
| | | cerevisiae strain, similar to HB965 in | OXC158 SSM | |
| | | example 1 | | |
| HB2736 | PLAS-680 | Saccharomyces cerevisiae base strain | OXC158 | 3 |
| | | HB2652 | | |
| HB2737 | PLAS-416 | Saccharomyces cerevisiae base strain | mScarlet | 3 |
| | | HB2652 | | |
| PLT1755-H11 | PLAS-683 | Saccharomyces cerevisiae base strain | OXC158-I351G | 3 |
| | | HB2652 | (DNA: SEQ ID NO: 165) | |
| PLT1759-E8 | PLAS-684 | Saccharomyces cerevisiae base strain | OXC158-S367R | 3 |
| | | HB2652 | (DNA: SEQ ID NO: | |
| | | | 165 or SEQ ID NO: 166) | |
| PLT1745-H2 | PLAS-685 | Saccharomyces cerevisiae base strain | OXC158-Q274G | 3 |
| | | HB2652 | (DNA: SEQ ID NO: 167) | |
| PLT1755-H8 | PLAS-686 | Saccharomyces cerevisiae base strain | OXC158-I351M | 3 |
| | | HB2652 | (DNA: SEQ ID NO: 168) | |
| PLT1762-F6 | PLAS-687 | Saccharomyces cerevisiae base strain | OXC158-V383A | 3 |
| | | HB2652 | (DNA: SEQ ID NO: 169) | |
| PLT1759-G8 | PLAS-688 | Saccharomyces cerevisiae base strain | OXC158-S367Q | 3 |
| | | HB2652 | (DNA: SEQ ID NO: 170) | |
| PLT1759-F10 | PLAS-689 | Saccharomyces cerevisiae base strain | OXC158-S367N | 3 |
| | | HB2652 | (DNA: SEQ ID NO: 171) | |
| PLT1759-G11 | PLAS-690 | Saccharomyces cerevisiae base strain | OXC158-S367R | 3 |
| | | HB2652 | (DNA: SEQ ID NO: 172) | |
| HB3192 | none | A CBGa-producing Saccharomyces | Base strain for OXC158 | 4 |
| | | cerevisiae strain, similar to HB965 in | combinatorial library | |
| | | example 1 | | |
| HB3324 | none | Saccharomyces cerevisiae base strain | Integrated OXC158 | 4 |
| | | HB3192; pSmGAL2: OXC158 | control for OXC158 | |
| | | | combinatorial library | |
| HB3325 | PLAS-525 | Saccharomyces cerevisiae base strain | Cas9 plasmid control | 4 |
| | | HB3192 | | |
| PLT1916-B1 | none | Saccharomyces cerevisiae base strain | OXC158-L31E/V383G | 4 |
| | | HB3192; pSmGAL2: OXC158- | (DNA SEQ ID NO: 181) | |
| | | L31E/V383G | | |
| PLT1916-B5 | none | Saccharomyces cerevisiae base strain | OXC158-N138T/V383M/H515E | 4 |
| | | HB3192; pSmGAL2: OXC158- | (DNA SEQ ID NO: 182) | |
| | | N138T/V383M/H515E | | |
| PLT1912-B9 | none | Saccharomyces cerevisiae base strain | OXC158-S367K/V383A/P513V | 4 |
| | | HB3192; pSmGAL2: OXC158- | (DNA SEQ ID NO: 183) | |
| | | S367K/V383A/P513V | | |
| PLT1913-D3 | none | Saccharomyces cerevisiae base strain | OXC158-V383A | 4 |
| | | HB3192; pSmGAL2: OXC158-V383A | (DNA SEQ ID NO: 184) | |
| PLT1914-D9 | none | Saccharomyces cerevisiae base strain | OXC158- | 4 |
| | | HB3192; pSmGAL2: OXC158- | W3A/L31E/K226M/S367Q/ | |
| | | W3A/L31E/K226M/S367Q/V383M/S399G/ | V383M/S399G/P513V | |
| | | P513V | (DNA SEQ ID NO: 185) | |
| PLT1917-G2 | none | Saccharomyces cerevisiae base strain | OXC158-W3A/N5Q/I351G | 4 |
| | | HB3192; pSmGAL2: OXC158 - | | |
| | | W3A/N5Q/I351G | | |
| PLT1922-H2 | none | Saccharomyces cerevisiae base strain | OXC158-I351GA/383A | 4 |
| | | HB3192; pSmGAL2: OXC158 - | (SEQ ID NO: 186) | |
| | | I351G/V383A | | |
| PLT1911-F1 | none | Saccharomyces cerevisiae base strain | OXC158- | 4 |
| | | HB3192; pSmGAL2: OXC158- | L31E/Q274G/S367K/V383A | |
| | | L31E/Q274G/S367K/V383A | | |
| PLT1921-D7 | none | Saccharomyces cerevisiae base strain | OXC158-W3A/I351G/V383A | 4 |
| | | HB3192; pSmGAL2: OXC158 - | (DNA SEQ ID NO: 187) | |
| | | W3A/I351G/V383A | | |
| PLT1922-E5 | none | Saccharomyces cerevisiae base strain | OXC158- | 4 |
| | | HB3192; pSmGAL2: OXC158 - | W3A/N5Q/N28E/I351G/ | |
| | | W3A/N5Q/N28E/I351G/S367R/V383A | S367R/V383A | |
| | | | (DNA SEQ ID NO: 188) | |
| HB863 | None | CEN.PK2; ΔLEU2; ΔURA3; | | 5 |
| HB3292 | none | Saccharomyces cerevisiae | Base strain for CBGVa | 5 |
| | | CEN.PK2; ΔLEU2; ΔURA3; | production | |
| | | ERG20-K197E | | |
| | | ALD6; ACS1-L641P; NpgA; MAF1; | | |
| | | ΔpACC1::pPGK1: ACC1; tHMGR1; IDI1; | | |
| | | pTEF1: CsOAC; pGAL1: CsAAE1; | | |
| | | pGAL1: PT254-R2S; | | |
| | | pGAL1: PKS73 | | |
| HB3291 | none | Saccharomyces cerevisiae base strain | Cannabis sativa CBDAS | 5 |
| | | HB3292 | integrated control for CBDVa | |
| | | pTEF1: OXC52 | production | |
| HB3209 | none | Saccharomyces cerevisiae base strain | Integrated OXC154- | 5 |
| | | HB3292 | S88A/L451G | |
| | | pTEF1: OXC154-S88A/L451G | (DNA SEQ ID NO: 4) | |
| HB3300 | none | Saccharomyces cerevisiae base strain | Integrated OXC154- | 5 |
| | | HB3292 | R3G/A18E/S60T/G351I/ | |
| | | pGAL1: OXC154- | A383V/L451G | |
| | | R3G/A18E/S60T/G351I/A383V/L451G | | |

[0306] Table 15 lists point substitutions described in Examples 2-4. Amino acid position numbers refer to the OXC154 sequence. Table 8, above, lists other substitutions mentioned herein.

TABLE 15
Point Substitutions Described in Examples 2-4
Amino acid position numbers refer to the OXC154 or OX158 sequence

| | | Number of occurrences in |
|---|---|---|
| | | SEQ ID NOs: 161-164; |
| Substitution | Type | 173-180; 189-196 |
| W3A | Non-conservative | 4 |
| N5Q | Conservative | 2 |
| N28E | Non-conservative | 1 |
| L31E | Non-conservative | 3 |
| Q274G | Non-conservative | 2 |
| I351G | Conservative | 5 |
| I351M | Conservative | 1 |
| S367Q | Conservative | 2 |
| S367N | Conservative | 1 |
| S367R | Non-conservative | 3 |
| S367K | Non-conservative | 2 |
| V383A | Conservative | 7 |
| V383M | Conservative | 2 |
| V383G | Conservative | 1 |
| S399G | Non-conservative | 1 |
| P513V | Non-conservative | 2 |
| H515E | Non-conservative | 1 |

[0307] Table 16 shows plasmids used herein.

TABLE 16
Plasmids

| # | Plasmid Name | SEQ ID NO. | Description | Selection |
|---|---|---|---|---|
| 72 | PLAS-679 | SEQ ID | OXC154-R3G/A18E/S60T/G351I/ | Uracil |
| | | NO. 157 | A383V/L451G-VB40 | |
| 73 | PLAS-680 | SEQ ID | OXC154-R3W/A18E/T49R/V97E/ | Uracil |
| | | NO. 158 | G351I/A383V/L451G(OXC158)-VB40 | |
| 74 | PLAS-681 | SEQ ID | PLT1675-D3: OXC154- | Uracil |
| | | NO. 159 | R3W/A18E/T49R/V97E/G351I/ | |
| | | | A383V/L451G-VB40 | |
| 75 | PLAS-682 | SEQ ID | PLT1675-F10: OXC154-R3T/ | Uracil |
| | | NO. 160 | S60T/G351I/A383V/L451G-VB40 | |
| 76 | PLAS-683 | SEQ ID | PLT1755-H11: OXC158-I351G | Uracil |
| | | NO. 165 | | |
| 77 | PLAS-684 | SEQ ID | PLT1759-E8: OXC158-S367R | Uracil |
| | | NO. 166 | | |
| 78 | PLAS-685 | SEQ ID | PLT1745-H2: OXC158-Q274G | Uracil |
| | | NO. 167 | | |
| 79 | PLAS-686 | SEQ ID | PLT1755-H8: OXC158-I351M | Uracil |
| | | NO. 168 | | |
| 80 | PLAS-687 | SEQ ID | PLT1762-F6: OXC158-V383A | Uracil |
| | | NO. 169 | | |
| 81 | PLAS-688 | SEQ ID | PLT1759-G8: OXC158-S367Q | Uracil |
| | | NO. 170 | | |
| 82 | PLAS-689 | SEQ ID | PLT1759-F10: OXC158-S367N | Uracil |
| | | NO. 171 | | |
| 83 | PLAS-690 | SEQ ID | PLT1759-G11: OXC158-S367R | Uracil |
| | | NO. 172 | | |
| 84 | PLAS-635 | SEQ ID | pCAS-GRN248 | G418 |
| | | NO. 197 | | |

[0308] Table 17 shows further sequences described herein. Assigned descriptive names for sequences indicate the starting sequence from which mutations are made, which may be for example “OXC154” or “OXC158”. Where OXC154 is indicated, the listed mutated residues in the descriptive name are changed from SEQ ID NO:141. Where OXC158 is indicated in the descriptive name, the listed mutations in the descriptive indicate a change from those residues indicated in the protein of SEQ ID NO:162. For example, SEQ ID NO:195 (Protein), indicated as DNA SEQ ID NO:187, is assigned “OXC158-W3A/I351G/V383A” within its descriptive name. Thus, for this sequence the mutations from SEQ ID NO: 141 are firstly those of OXC158 (as in SEQ ID NO:162, specifically: R3W/A18E/T49R/V97E/G351I/A383V/L451 G), and from these mutations, further mutations are indicated as W3A/I351 G/V383A. Notably, this means that in SEQ ID NO:195, residue 3 is A, residue 351 is G, and residue 383 is A whereas residue 18 is E, residue 49 is R, residue 97 is E, and residue 451 is G.

TABLE 17
Sequences

| | | | Length of | Position of coding |
|---|---|---|---|---|
| SEQ ID NO: | Description | DNA/Protein | sequence | sequence |
| SEQ ID | OXC154- | DNA | 7266 | 2925 to 4499 |
| NO. 157 | R3G/A18E/S60T/G351I/ | | | |
| | A383V/L451G-VB40 | | | |
| SEQ ID | OXC154- | DNA | 7266 | 2925 to 4499 |
| NO. 158 | R3W/A18E/T49R/V97E/G351I/A383V/ | | | |
| | L451G(OXC158)-VB40 | | | |
| SEQ ID | PLT1675-D3: OXC154- | DNA | 7266 | 2925 to 4499 |
| NO. 159 | R3W/A18E/T49R/V97E/ | | | |
| | G351I/A383V/L451G-VB40 | | | |
| SEQ ID | PLT1675-F10: OXC154- | DNA | 7266 | 2925 to 4499 |
| NO. 160 | R3T/S60T/G351I/A383V/L451G-VB40 | | | |
| SEQ ID | OXC154- | Protein | 524 | All |
| NO. 161 | R3G/A18E/S60T/G351I/A383V/L451G-VB40 | | | |
| SEQ ID | OXC154- | Protein | 524 | All |
| NO. 162 | R3W/A18E/T49R/V97E/G351I/A383V/ | | | |
| | L451G(OXC158)-VB40 (which may be | | | |
| | alternatively referenced herein as | | | |
| | “OXC158”) | | | |
| SEQ ID | PLT1675-D3: OXC154- | Protein | 524 | All |
| NO. 163 | R3W/A18E/T49R/V97E/ | | | |
| | G351I/A383V/L451G-VB40 | | | |
| SEQ ID | PLT1675-F10: OXC154- | Protein | 524 | All |
| NO. 164 | R3T/S60T/G351I/A383V/L451G-VB40 | | | |
| SEQ ID | PLT1755-H11: OXC158-I351G | DNA | 7266 | 2925 to 4499 |
| NO. 165 | | | | |
| SEQ ID | PLT1759-E8: OXC158-S367R(=CGG) | DNA | 7266 | 2925 to 4499 |
| NO. 166 | | | | |
| SEQ ID | PLT1745-H2: OXC158-Q274G | DNA | 7266 | 2925 to 4499 |
| NO. 167 | | | | |
| SEQ ID | PLT1755-H8: OXC158-I351M | DNA | 7266 | 2925 to 4499 |
| NO. 168 | | | | |
| SEQ ID | PLT1762-F6: OXC158-V383A | DNA | 7266 | 2925 to 4499 |
| NO. 169 | | | | |
| SEQ ID | PLT1759-G8: OXC158-S367Q | DNA | 7266 | 2925 to 4499 |
| NO. 170 | | | | |
| SEQ ID | PLT1759-F10: OXC158-S367N | DNA | 7266 | 2925 to 4499 |
| NO. 171 | | | | |
| SEQ ID | PLT1759-G11: OXC158-S367R(=AGG) | DNA | 7266 | 2925 to 4499 |
| NO. 172 | | | | |
| SEQ ID | PLT1755-H11: OXC158-I351G | Protein | 524 | All |
| NO. 173 | | | | |
| SEQ ID | PLT1759-E8: OXC158-S367R(=CGG) | Protein | 524 | All |
| NO. 174 | | | | |
| SEQ ID | PLT1745-H2: OXC158-Q274G | Protein | 524 | All |
| NO. 175 | | | | |
| SEQ ID | PLT1755-H8: OXC158-I351M | Protein | 524 | All |
| NO. 176 | | | | |
| SEQ ID | PLT1762-F6: OXC158-V383A | Protein | 524 | All |
| NO. 177 | | | | |
| SEQ ID | PLT1759-G8: OXC158-S367Q | Protein | 524 | All |
| NO. 178 | | | | |
| SEQ ID | PLT1759-F10: OXC158-S367N | Protein | 524 | All |
| NO. 179 | | | | |
| SEQ ID | PLT1759-G11: OXC158-S367R(=AGG) | Protein | 524 | All |
| NO. 180 | | | | |
| SEQ ID | PLT1916-B1: OXC158-L31E/V383G | DNA | 3690 | 1379 to 2932 |
| NO. 181 | | | | |
| SEQ ID | PLT1916-B5: OXC158- | DNA | 3690 | 1379 to 2932 |
| NO. 182 | N138T/V383M/H515E | | | |
| SEQ ID | PLT1912-B9: OXC158- | DNA | 3690 | 1379 to 2932 |
| NO. 183 | S367K/V383A/P513V | | | |
| SEQ ID | PLT1913-D3: OXC158-V383A | DNA | 3690 | 1379 to 2932 |
| NO. 184 | | | | |
| SEQ ID | PLT1914-D9: OXC158- | DNA | 3690 | 1379 to 2932 |
| NO. 185 | W3A/L31E/K226M/S367Q/ | | | |
| | V383M/S399G/P513V | | | |
| SEQ ID | PLT1922-H2: OXC158-I351G/V383A | DNA | 3690 | 1379 to 2932 |
| NO. 186 | | | | |
| SEQ ID | PLT1921-D7: OXC158- | DNA | 3690 | 1379 to 2932 |
| NO. 187 | W3A/I351G/V383A | | | |
| SEQ ID | PLT1922-E5: OXC158- | DNA | 3690 | 1379 to 2932 |
| NO. 188 | W3A/N5Q/N28E/I351G/S367R/V383A | | | |
| SEQ ID | PLT1916-B1: OXC158-L31E/V383G | Protein | 524 | All |
| NO. 189 | | | | |
| SEQ ID | PLT1916-B5: OXC158- | Protein | 524 | All |
| NO. 190 | N138T/V383M/H515E | | | |
| SEQ ID | PLT1912-B9: OXC158- | Protein | 524 | All |
| NO. 191 | S367K/V383A/P513V | | | |
| SEQ ID | PLT1913-D3: OXC158-V383A | Protein | 524 | All |
| NO. 192 | | | | |
| SEQ ID | PLT1914-D9: OXC158- | Protein | 524 | All |
| NO. 193 | W3A/L31E/K226M/S367Q/ | | | |
| | V383M/S399G/P513V | | | |
| SEQ ID | PLT1922-H2: OXC158-I351G/V383A | Protein | 524 | All |
| NO. 194 | | | | |
| SEQ ID | PLT1921-D7: OXC158- | Protein | 524 | All |
| NO. 195 | W3A/I351G/V383A | | | |
| SEQ ID | PLT1922-E5: OXC158- | Protein | 524 | All |
| NO. 196 | W3A/N5Q/N28E/I351G/S367R/V383A | | | |
| SEQ ID | pCAS-GRN248 | DNA | 9706 | gRNA GRN248: |
| NO. 197 | | | | 1986-2105 |
| | | | | CAS9: 5279-9379 |
| SEQ ID | pSmGAL2: OXC158 | DNA | 3690 | 1379 to 2932 |
| NO. 198 | | | | |
| SEQ ID | ΔpACC1::pPGK1: ACC1 | DNA | 8989 | 1288 to 7989 |
| NO. 199 | | | | |
| SEQ ID | pTEF1: CsOAC | DNA | 2709 | 1374 to 1682 |
| NO. 200 | | | | |
| SEQ ID | pGAL1: CsAAE1 | DNA | 4288 | 1289 to 3454 |
| NO. 201 | | | | |
| SEQ ID | pGAL1: PKS73 | DNA | 2516 | 728 to 1825 |
| NO. 202 | | | | |
| SEQ ID | pTEF1: OXC52 | DNA | 3598 | 1112 to 2959 |
| NO. 203 | | | | |
| SEQ ID | pTEF1: OXC154-S88A/L451G | DNA | 3601 | 1112 to 2962 |
| NO. 204 | | | | |
| SEQ ID | pGAL1: OXC154- | DNA | 3390 | 922 to 2751 |
| NO. 205 | R3G/A18E/S60T/G351I/A383V/L451G | | | |
| SEQ ID | 3′ Histidine tag | AA | | |
| NO. 206 | | | | |
| SEQ ID | OXC154 with variant residues | Protein | 524 | All |
| NO. 207 | | | | |

[0309] Table 18 shows modifications to base strains used.

TABLE 18
Modifications to Base Strains

| | | | Integration | | |
|---|---|---|---|---|---|
| | Modification | SEQ | Region/ | | Genetic Structure |
| # | name | ID NO. | Plasmid | Description | of Sequence |
| 1 | ALD6; | SEQ | Flagfeldt | Acetaldehyde dehydrogenase | Fgf19Up::pTDH3: ALD6: |
| | ACS1- | ID NO. | Site 19 | (ALD6) | tADH1::pTEF1: SeACS1- |
| | L641P | 148 | integration | from S. cerevisiae and | L641P: tPRM9::Fgf19Down |
| | | | (Flagfeldt et | acetyl-CoA | |
| | | | al., 2009) | synthase from Salmonella enterica | |
| | | | | (SeACS1-L641P). Will | |
| | | | | allow greater | |
| | | | | accumulation of | |
| | | | | acetyl-CoA in the cell. | |
| | | | | (Shiba et al., 2007) | |
| 2 | NpgA | SEQ | Flagfeldt | Phosphopantetheinyl | Fgf14Up::pTEF1: NpgA: |
| | | ID NO. | Site 14 | transferase from | tPRM9::Fgf14Down |
| | | 142 | integration | Aspergillus niger. | |
| | | | (Flagfeldt et | Accessory Protein for | |
| | | | al., 2009) | DiPKS. (Kim et al., 2015) | |
| 3 | MAF1 | SEQ | Flagfeldt | MAF1 is a regulator of | Fgf5Up::pTEF1: Maf1: |
| | | ID NO. | Site 5 | tRNA biosynthesis. | tPRM9::Fgf5Down |
| | | 149 | integration | Overexpression in S. cerevisiae | |
| | | | (Flagfeldt et | has demonstrated higher | |
| | | | al., 2009) | monoterpene (GPP) | |
| | | | | yields. (Liu et | |
| | | | | al., 2013) | |
| 4 | Erg20K197E | SEQ | Chromosomal | Mutant of Erg20 protein | Tpi1t: ERG20K197E: |
| | | ID NO. | modification | that diminishes | Cyc1t::Tef1p: KanMX: Tef1t |
| | | 150 | | FPP synthase activity | |
| | | | | creating greater | |
| | | | | pool of GPP precursor. | |
| | | | | Negatively affects | |
| | | | | growth phenotype.(Oswald | |
| | | | | et al., 2007) | |
| 5 | tHMGR1; | SEQ | USER Site | Overexpression of truncated | USERX- |
| | IDI1 | ID NO. | X-3 | Hmg1 and Idi1 proteins that | 3Up::pTDH3: tHMGR1: |
| | | 152 | integration | have been previously | tADH1::pTEF1: IDI1: |
| | | | (Jensen et | identified to be bottlenecks in the | tPRM9::USERX-3Down |
| | | | al., 2014) | S. cerevisiae terpenoid | |
| | | | | pathway responsible | |
| | | | | for GPP production | |
| | | | | (Ro et al., 2006) | |
| 6 | pGAL1: PT254- | SEQ | Flagfeldt | The Cannabis sativa | Fgf20Up::pGAL1: PT254- |
| | R2S | ID NO. | Site 20 | prenyltransferase | R2S: tCYC1::Fgf20Down |
| | | 155 | integration | PT254 allows CBGa to | |
| | | | (Flagfeldt et | be produced from | |
| | | | al., 2009) | olivetolic acid and | |
| | | | | geranyl pyrophosphate | |
| | | | | (Luo et al., 2019). The | |
| | | | | N-terminal arginine | |
| | | | | of this enzyme has been | |
| | | | | replaced with a | |
| | | | | serine in order to enhance | |
| | | | | protein stability | |
| | | | | in accordance with N-end rule | |
| | | | | (Varshavsky 1996). | |
| 7 | pSmGAL2: OXC158 | SEQ | USER Site | Mutated Cannabis sativa | USERXI- |
| | | ID NO. | XI-1 | oxidocyclase | 1Up::pSmGAL2: OXC158: |
| | | 198 | integration | (CBDAS) protein allows | tCYC1::USERXI-1Down |
| | | | (Jensen et | the production of | |
| | | | al., 2014) | CBDa from CBGa. | |
| 8 | ΔpACC1::pPGK1: ACC1 | SEQ | Chromosomal | Leads to greater | pACC1::pPGK1: ACC1: tACC1 |
| | | ID NO. | Modification | malonyl-CoA pools. The | |
| | | 199 | | promoter of ACC1 was | |
| | | | | changed to a | |
| | | | | constitutive promoter | |
| | | | | for higher | |
| | | | | expression. (Shi et | |
| | | | | al., 2014) | |
| 9 | pTEF1: CsOAC | SEQ | Flagfeldt | The Cannabis sativa | Fgf16Up::pTEF1: CsOAC: |
| | | ID NO. | Site 16 | olivetolic acid | tENO2::Fgf16Down |
| | | 200 | integration | cyclase (CsOAC) protein | |
| | | | (Flagfeldt et | allows the production of | |
| | | | al., 2009) | divarinic acid from a | |
| | | | | polyketide precursor. | |
| 10 | pGAL1: CsAAE1 | SEQ | USER Site | The Cannabis sativa | USERXI- |
| | | ID NO. | XI-2 | acyl-activating | 2Up::GAL1: CsAAE1: |
| | | 201 | integration | enzyme (CsAAE1) | tCYC1::USERXI-2Down |
| | | | (Jensen et | | |
| | | | al., 2014) | | |
| 11 | pGAL1: PKS73 | SEQ | USER Site | Type III PKS domain from | USERX- |
| | | ID NO. | X-4 | PKS from | 4Up::pGAL1: PKS73: |
| | | 202 | integration | P. pallidum. PKS113 | tCYC1::USERX-4Down |
| | | | (Jensen et | | |
| | | | al., 2014) | | |
| 12 | pTEF1: OXC52 | SEQ | Apel-3 | The Cannabis sativa CBDa | Apel- |
| | | ID NO. | Integration | synthase | 3Up::pTEF1: OXC52: |
| | | 203 | Site (Reider | (OXC52) protein allows | tCYC1::Apel-3Down |
| | | | et al., 2017) | for the production | |
| | | | | of CBDVa from CBGVa | |
| 13 | pTEF1: OXC154- | SEQ | Apel-3 | Mutated Cannabis sativa CBDa | Apel-3Up::pTEF1: |
| | S88A/L451G | ID NO. | Integration | synthase (OXC154-S88A/L451G) | OXC154-S88A/L451G: |
| | | 204 | Site (Reider | protein allows for | tCYC1::Apel-3Down |
| | | | et al., 2017) | improved production of | |
| | | | | CBDVa from CBGVa | |
| 14 | pGAL1: OXC154- | SEQ | Apel-3 | Mutated Cannabis sativa | Apel-3Up::pGAL1: (XC154- |
| | R3G/A18E/S60T/ | ID NO. | Integration | CBDa synthase (OXC154-R3G/A18E/ | R3G/A18E/S60T/G351I/ |
| | G351I/A383V/ | 205 | Site (Reider | S60T/G351I/A383V/L451G) | A383V/L451G: |
| | L451G | | et al., 2017) | protein allows for improved | tCYC1::Apel-3Down |
| | | | | production of CBDVa | |
| | | | | from CBGVa | |
| 15 | PLT1916-B1: OXC158- | SEQ | USER Site | Mutated Cannabis sativa | USERXI-1Up::pSmGAL2: |
| | L31E/V383G | ID NO. | XI-1 | oxidocyclase (CBDAS) protein | OXC158-L31E/V383G: |
| | | 181 | integration | allows the production of | tCYC1::USERXI-1Down |
| | | | (Jensen et | CBDa from CBGa. | |
| | | | al., 2014) | | |
| 16 | PLT1916-B5: OXC158- | SEQ | USER Site | Mutated Cannabis sativa | USERXI-1Up::pSmGAL2: |
| | N138T/V383M/ | ID NO. | XI-1 | oxidocyclase (CBDAS) protein | OXC158-N138T/V383M/H515E: |
| | H515E | 182 | integration | allows the production of | tCYC1::USERXI-1Down |
| | | | (Jensen et | CBDa from CBGa. | |
| | | | al., 2014) | | |
| 17 | PLT1912-B9: OXC158- | SEQ | USER Site | Mutated Cannabis sativa | USERXI- |
| | S367K/V383A/P513V | ID NO. | XI-1 | oxidocyclase (CBDAS) protein | 1Up::pSmGAL2: OXC158- |
| | | 183 | integration | allows the production of | S367K/V383A/P513V: |
| | | | (Jensen et | CBDa from CBGa. | tCYC1::USERXI-1Down |
| | | | al., 2014) | | |
| 18 | PLT1913-D3: OXC158- | SEQ | USER Site | Mutated Cannabis sativa | USERXI- |
| | V383A | ID NO. | XI-1 | oxidocyclase (CBDAS) protein | 1Up::pSmGAL2: OXC158- |
| | | 184 | integration | allows the production of | V383A: tCYC1::USERXI-1Down |
| | | | (Jensen et | CBDa from CBGa. | |
| | | | al., 2014) | | |
| 19 | PLT1914-D9: OXC158- | SEQ | USER Site | Mutated Cannabis sativa | USERXI- |
| | W3A/L31E/K226M/ | ID NO. | XI-1 | oxidocyclase (CBDAS) protein | 1Up::pSmGAL2: OXC158- |
| | S367Q/V383M/S399G/ | 185 | integration | allows the production of | W3A/L31E/K226M/S367Q/V383M/S399G/ |
| | P513V | | (Jensen et | CBDa from CBGa. | P513V: tCYC1::USERXI-1Down |
| | | | al., 2014) | | |
| 20 | PLT1922-H2: OXC158- | SEQ | USER Site | Mutated Cannabis sativa | USERXI- |
| | I351G/ | ID NO. | XI-1 | oxidocyclase (CBDAS) protein | 1Up::pSmGAL2: OXC158- |
| | V383A | 186 | integration | allows the production of | I351G/V383A: |
| | | | (Jensen et | CBDa from CBGa. | tCYC1::USERXI-1Down |
| | | | al., 2014) | | |
| 21 | PLT1921-D7: OXC158-W3A/ | SEQ | USER Site | Mutated Cannabis sativa | USERXI- |
| | I351G/ | ID NO. | XI-1 | oxidocyclase (CBDAS) protein | 1Up::pSmGAL2: OXC158- |
| | V383A | 187 | integration | allows the production of | W3A/I351G/V383A: |
| | | | (Jensen et | CBDa from CBGa. | tCYC1::USERXI-1Down |
| | | | al., 2014) | | |
| 22 | PLT1922-E5: OXC158- | SEQ | USER Site | Mutated Cannabis sativa | USERXI- |
| | W3A/N5Q/ | ID NO. | XI-1 | oxidocyclase (CBDAS) protein | 1Up::pSmGAL2: OXC158- |
| | N28E/I351G/ | 188 | integration | allows the production of | W3A/N5Q/N28E/I351G/S367R/ |
| | S367R/ | | (Jensen et | CBDa from CBGa. | V383A: tCYC1::USERXI-1Down |
| | V383A | | al., 2014) | | |

### Example 6

[0310] OXC Variants for the Production of CBCa

[0311] CBCa is a naturally occurring phytocannabinoid similar in structure to THCa and CBDa. CBCa is produced when CBGa is brought into contact with an appropriate oxidocyclase (OXC). OXC variants for the production of CBCa are described herein.

[0312] Materials and Methods:

[0313] Genetic Manipulations:

[0314] HB42 was used as a base strain to develop all other strains in this experiment. CRISPR and DNA transformation protocols were done as described in Example 4.

[0315] Strain Growth and Media:

[0316] Strains were grown in a production media with a composition of 1.7 g/L YNB without ammonium sulfate and amino acid, 1.92 g/L URA dropout amino acid supplement, 1.5 g/L hemi-magnesium L-glutamate, 2.5 g/L yeast extracts, 1 g/L monopotassium phosphate, 2 g/L magnesium sulfate heptahydrate, with 2% w/v glucose and 3.8% w/v galactose (Sigma-Aldrich Canada). The culture was incubated at 30° C. for four days (96 hours).

[0317] Experimental Conditions:

[0318] Each variant was tested in three replicates and each replicate was clonally derived from single colonies. All strains were grown in 500 μL of media for 96 hours in 96-well deepwell plates. The 96-well deepwell plates were incubated at 30° C. and shaken at 950 rpm for 96 hrs.

[0319] Metabolite extraction was performed by adding 900 μl of an 83% Acetonitrile solution to 100 μl of culture in a new 96-well deepwell plate, followed by resuspension 10 times with a 200 ul pipette. The solutions were then centrifuged at 3750 rpm for 5 min. 200 μl of the soluble layer was removed and stored in a 96-well v-bottom microtiter plate. Samples were stored at −20° C. until analysis.

[0320] Metabolite extraction was conducted by thoroughly mixing 30 μL of sample culture with 270 μL of 56% acetonitrile in a 96-well microtiter plate, then centrifuged at 3750 rpm for 10 mins. The soluble layer was removed and diluted with 56% acetonitrile to an appropriate concentration in a new 96-well microtiter plate and stored at −20° C. until analysis.

[0321] Samples were quantified using HPLC-MS analysis.

[0322] Quantification Protocol:

[0323] The quantification of CBGa, THCa, CBDa and CBCa was performed using HPLC-MS on a Acquity UPLC-TQD MS. The chromatography and MS conditions are described below.

[0324] LC Conditions

[0325] Column: ACQUITY UPLC 50×1 mm, 1.8 μm particle size; Column temperature: 45° C.; Flow rate: 0.20 ml/min; Eluent A: Water 0.1% formic acid; Eluent B: Acetonitrile 0.1% formic acid; Gradient is shown in Table 19.

TABLE 19
Gradient

| Time (min) | % B |
|---|---|
| 0 | 75 |
| 2.5 | 75 |

[0326] ESI-MS Conditions

[0327] The following conditions were utilized: Capillary: 2.7 (kV); Source temperature: 150° C.; Desolvation gas temperature: 250° C.; Desolvation gas flow (nitrogen): 500 L/hour; Cone gas flow (nitrogen): 50 L/hour. Detection parameters are shown in Table 20.

TABLE 20
Detection Parameters

| | CBGa | THCa | CBDa | CBCa |
|---|---|---|---|---|
| Retention time (min) | 0.75 | 1.54 | 0.74 | 1.75 |
| Transition (m/z) | 359.2→341.2 | 357.2→313.2 | 357.2→245.1 | 357.1 → 191.1 |
| Mode | ES−, MRM | ES−, MRM | ES−, MRM | ES−, MRM |
| Cone | 30 | 45 | 45 | 44 |
| Cone (V) | 20 | 20 | 20 | 20 |

[0328] Results:

[0329] Production of CBCa in S. cerevisiae using oxidocyclases was observed.

[0330] CBDa, THCa and CBCa were producing by transforming a CBGa producing strain (HB3167) with plasmids containing OXC52 (SEQ ID NO:1), OXC157 (SEQ ID NO:205) and OXC158 (SEQ ID NO:158).

[0331] FIG. 14A and FIG. 14B show the results. FIG. 14A shows Panels A-D illustrating the production of meroterpenoids in HB3167 red fluorescent protein control (RFP). FIG. 14B shows Panels E-H illustrating red fluorescent protein control production of meroterpenoids in HB3167 transformed with OXC157. Integrated peaks (shaded solid peaks) indicate the presence of a specific Meroterpenoid. The integrated peaks (solid fill peaks) shown in Panel A (FIG. 14A) and Panels E-F (FIG. 14B) indicate the presence of a specific meroterpenoid.

[0332] Quantification of meroterpenoid production was also performed and it was shown that CBCa scaled with the production of CBDa.

[0333] Table 21 shows the quantified production of meroterpenoids (ppm) on the basis of strain.

TABLE 21
Quantified Production of Meroterpenoids (ppm) by Strain

| Strain | Plasmid | OXC # | CBGa | THCa | CBDa | CBCa |
|---|---|---|---|---|---|---|
| HB3167 | PLAS400 | RFP | 94.32 | 0.00 | 0.00 | 0.00 |
| HB3802 | PLAS415 | OXC52 | 44.15 | 0.00 | 10.58 | 0.00 |
| HB3803 | PLAS419 | OXC52 | 62.73 | 11.75 | 0.00 | 0.00 |
| HB3804 | PLAS679 | OXC157 | 0.89 | 2.56 | 46.14 | 12.24 |
| HB3805 | PLAS646 | OXC158 | 2.33 | 2.51 | 51.88 | 14.05 |

[0334] Table 22 lists characteristics of the strains utilized in this Example, beyond those strains already described in previous Examples 1 to 5.

TABLE 22
List of Strains Described in Examples 6

| Strain # | Plasmid | Genotype/base strain | Notes |
|---|---|---|---|
| HB3167 | none | A CBGa-producing Saccharomyces | Base strain for CBCa production |
| | | cerevisiae strain, similar to HB965 in | assays |
| | | example 1 | |
| HB3802 | PLAS-400 | Saccharomyces cerevisiae base strain | Gal1p: RFP: Cyc1t |
| | | HB3167 | |
| HB3803 | PLAS-415 | Saccharomyces cerevisiae base strain | VB40_OST1_pro-alpha- |
| | | HB3167 | f(I)_OXC52 |
| HB3804 | PLAS-419 | Saccharomyces cerevisiae base strain | VB40_ostl-proaf(I)_OXC53 |
| | | HB3167 | |
| HB3805 | PLAS-646 | Saccharomyces cerevisiae base strain | VB40_ost1-proaf1-OXC158 |
| | | HB3167 | (PLT1675-C8; OXC154-R3G(=GGG)/ |
| | | | A18E(=GAG)/S60T(=ACG)/ |
| | | | G351I(=ATC)/A383V(=GTG)/ |
| | | | L451G(=GGC)) |

[0335] Table 23 describes the plasmids used in this Example, beyond those already described in previous Examples 1 to 5.

TABLE 23
Plasmids

| | Plasmid | SEQ ID | | |
|---|---|---|---|---|
| # | Name | NO. | Description | Selection |
| 85 | PLAS400 | NO. 208 | Gal1p: RFP: Cyc1t | Uracil |
| 86 | PLAS419 | NO. 209 | VB40_ostl-proaf(I)_OXC53 | Uracil |
| 87 | PLAS646 | NO. 210 | VB40_ost1-proaf1-OXC158 | Uracil |
| | | | (PLT1675-C8; OXC154-R3G(=GGG)/ | |
| | | | A18E(=GAG)/S60T(=ACG)/ | |
| | | | G351I(=ATC)/A383V(=GTG)/ | |
| | | | L451G(=GGC)) | |

[0336] Table 24 lists certain sequences described in this Example, beyond those already described in previous Examples 1 to 5.

TABLE 24
Additional Sequences

| | | DNA/ | Length of | Position of coding |
|---|---|---|---|---|
| SEQ ID NO: | Description | Protein | sequence | sequence |
| SEQ ID NO. 208 | PLAS400 | DNA | 699 | 264-3347 |
| SEQ ID NO. 209 | PLAS419 | DNA | 1830 | 1-1830 |
| SEQ ID NO. 210 | PLAS646 | DNA | 1830 | 2649-478 |

[0337] Strains HB3804 and HB3805 with plasmids PLAS-419 and PLAS-646, respectively (based on Saccharomyces cerevisiae base strain HB3167) showed significant CBCa production. Noting HB3804 as having VB40_ostl-proaf(I)_OXC53 (SEQ ID NO: 209, DNA) and noting HB3805 as having VB40_ostl-proaf1-OXC158 (PLT1675-C8; OXC154-R3G(=GGG)/A18E(=GAG)/560T(=ACG)/G351 I(=ATC)/A383V(=GTG)/L451G(=GGC)) (SEQ ID NO: 210, DNA; SEQ ID N0:211, protein).

[0338] Noting for SEQ ID NO:209 and SEQ ID NO:210, relevant to the described sequences of length of 7266, the position of the coding sequence is at 2925 to 4499 encodes a protein of 524 residues with the noted modifications.

### Examples Only

[0339] In the preceding description, for purposes of explanation, numerous details are set forth in order to provide a thorough understanding of the embodiments. However, it will be apparent to one skilled in the art that these specific details are not required.

[0340] The embodiments described herein are intended to be examples only. Alterations, modifications and variations can be made to the particular embodiments by those of skill in the art. The scope of the claims should not be limited by the particular embodiments set forth herein, but should be construed in a manner consistent with the specification as a whole.

[0341] The invention being thus described, it will be obvious that the same may be varied in many ways. Such variations are not to be regarded as a departure from the spirit and scope of the invention, and all such modifications as would be obvious to one skilled in the art are intended to be included within the scope of the following claims.

### REFERENCES

[0342] All publications, patents and patent applications mentioned in this specification are indicative of the level of skill those skilled in the art to which this invention pertains and are herein incorporated by reference to the same extent as if each individual publication, patent, or patent application was specifically and individually indicated to be incorporated by reference.

### Patents and Applications

[0343] U.S. Pat. No. 7,361,482
[0344] U.S. Pat. No. 8,884,100 (Page et al.) Aromatic Prenyltransferase from Cannabis.
[0345] WO2018/148848 (Mookerjee et al.) publication of PCT/CA2018/050189, METHOD AND CELL LINE FOR PRODUCTION OF PHYTOCANNABINOIDS AND PHYTOCANNABINOID ANALOGUES IN YEAST
[0346] WO2018/148849 (Mookerjee et al.) publication of PCT/CA2018/050190, METHOD AND CELL LINE FOR PRODUCTION OF POLYKETIDES IN YEAST.
[0347] WO2020/232553 (Bourgeois et al.) publication of PCT/CA2020/050687, METHODS AND CELLS FOR PRODUCTION OF PHYTOCANNABINOIDS AND PHYTOCANNABINOID PRECURSORS.
[0348] WO2020/208411 (Szamecz et al.) publication of PCT/IB2020/000241, Microorganisms and methods for the fermentation of cannabinoids.

### Non-Patent Literature

[0349] Bai Flagfeldt, D., Siewers, V., Huang, L. and Nielsen, J. (2009) “Characterization of chromosomal integration sites for heterologous gene expression in Saccharomyces cerevisiae” Yeast, 26, 545-551.
[0350] Eisenberg, D., Schwarz, E., Komaromy, M., & Wall, R. (1984). “Analysis of membrane and surface protein sequences with the hydrophobic moment plot”. Journal of Molecular Biology, 179(1), 125-142. https://doi.org/10.1016/0022-2836(84)90309-7.
[0351] Gagne, S. J., et al. (2012) “Identification of Olivetolic Acid Cyclase from Cannabis Sativa Reveals a Unique Catalytic Route to Plant Polyketides.” Proceedings of the National Academy of Sciences, vol. 109, No: 31, 2012, pp. 12811-12816. doi:10.1073/pnas.1200330109.
[0352] Ghosh, R., A. Chhabra, P. A. Phatale, S. K. Samrat, J. Sharma, A. Gosain, D. Mohanty, S. Saran and R. S. Gokhale (2008) “Dissecting the Functional Role of Polyketide Synthases in Dictyostelium discoideum biosynthesis of the differentiation regulating factor 4-methyl-5-pentylbenzene-1,3-diol” Journal of Biological Chemistry, 283(17), 11348-11354.
[0353] Gietz, R. D., & Woods, R. A. (2006). Yeast transformation by the LiAc/SS Carrier DNA/PEG method. In Yeast Protocol (pp. 107-120). Humana Press, Totowa, N.J.
[0354] Gietz, R. D. and Schiestl, R. H., (2007) “High-efficiency yeast transformation using the LiAc/SS carrier DNA/PEG method.” Nat. Protoc. 2, 31-34.
[0355] Gietz R. D. (2014) Yeast Transformation by the LiAc/SS Carrier DNA/PEG Method (pp 1-12). In: Smith J., Burke D. (eds) Yeast Genetics. Methods in Molecular Biology (Methods and Protocols), vol 1205. Humana Press, New York, N.Y. https://doi.org/10.1007/978-1-4939-1363-3_1.
[0356] Jensen, N. B., Strucko, T., Kildegaard, K. R., David, F., et al., (2014). EasyClone: method for iterative chromosomal integration of multiple genes in Saccharomyces cerevisiae. FEMS Yeast Research, Volume 14, Issue 2, pages 238-248; https://doi.org/10.1111/1567-1364.12118.
[0357] Kim, J.-M., Song, H.-Y., Choi, H.-J., So, K.-K., Kim, D.-H., Chae, K.-S., . . . Jahng, K.-Y. (2015). “Characterization of NpgA, a 4′-phosphopantetheinyl transferase of Aspergillus nidulans, and evidence of its involvement in fungal growth and formation of conidia and cleistothecia for development.” Journal of Microbiology, 53(1), 21-31 https://doi.org/10.1007/s12275-015-4657-8.
[0358] Kuzuyama et al. (2005) Structural basis for the promiscuous biosynthetic prenylation of aromatic natural products, Nature, volume 435, pages 983-987; doi: 10.1038/nature03668.
[0359] Liu, J., Zhang, W., Du, G., Chen, J., & Zhou, J. (2013). “Overproduction of geraniol by enhanced precursor supply in Saccharomyces cerevisiae.” Journal of Biotechnology, 168(4), 446-451. https://doi.org/10.1016/J.JBIOTEC.2013.10.017.
[0360] Luo, X., Reiter, M., d'Espaux, L., Wong, J., Denby, C., Lechner, A., Zhang, Y., Grzybowski, A., Harth, S., Lin, W., Lee, H., Yu, C., Shin, J., Deng, K., Benites, V., Wang, G., Baidoo, E., Chen, Y., Dev, I., Petzold, C. and Keasling, J. (2019). “Complete biosynthesis of cannabinoids and their unnatural analogues in yeast.” Nature, 567(7746), pp. 123-126.
[0361] Oswald, Marilyne; Marc Fischer, Nicole Dirninger, Francis Karst, (2007) “Monoterpenoid biosynthesis in Saccharomyces cerevisiae.” FEMS Yeast Research, 7(3), 413-421. https://doi.org/10.1111/j.1567-1364.2006.00172.x
[0362] Peng, B., Nielsen, L. K., Kampranis, S. C., & Vickers, C. E. (2018). Engineered protein degradation of farnesyl pyrophosphate synthase is an effective regulatory mechanism to increase monoterpene production in Saccharomyces cerevisiae. Metabolic Engineering, 47, 83-93. https://doi.org/10.1016/J.YMBEN.2018.02.005.
[0363] Peng, B., Wood, R. J., Nielsen, L. K., Vickers, C. E. (2018). An Expanded Heterologous GAL Promoter Collection for Diauxie-Inducible Expression in Saccharomyces cerevisiae. ACS Synth Biol. 7(2):748-751. https://doi.org/10.1021/acssynbio.7b00355
[0364] Reider Apel A, d'Espaux L, Wehrs M, et al. A Cas9-based toolkit to program gene expression in Saccharomyces cerevisiae. Nucleic Acids Res. 2017; 45(1):496-508. doi:10.1093/nar/gkw1023
[0365] Ro, D.-K., Paradise, E. M., Ouellet, M., Fisher, K. J., Newman, K. L., Ndungu, J. M., Keasling, J. D. (2006). Production of the antimalarial drug precursor artemisinic acid in engineered yeast. Nature, 440(7086), 940-943. JOUR. https://doi.org/10.1038/nature04640.
[0366] Ryan, O. W., Poddar, S., & Cate, J. H. D. (2016). CRISPR-Cas9 Genome Engineering in Saccharomyces cerevisiae Cells. Cold Spring Harbor Protocols, 2016(6), pdb.prot086827. https://doi.org/10.1101/pdb.prot086827.
[0367] Saeki, H., Hara, R., Takahashi, H., Iijima, M., Munakata, R., Kenmoku, H., . . . Taura, F. (2018). An Aromatic Farnesyltransferase Functions in Biosynthesis of the Anti-HIV Meroterpenoid Daurichromenic Acid. Plant Physiology, 178(2), 535-551; https://doi.org/10.1104/PP.18.00655.
[0368] Shi, S., Chen, Y., Siewers, V., & Nielsen, J. (2014). “Improving Production of Malonyl Coenzyme A-Derived Metabolites by Abolishing Snf1-Dependent Regulation of Acc1.” mBio, 5(3), e01130-14. https://doi.org/10.1128/mBio.01130-14.
[0369] Shiba, Y., Paradise, E. M., Kirby, J., Ro, D.-K., & Keasling, J. D. (2007). “Engineering of the pyruvate dehydrogenase bypass in Saccharomyces cerevisiae for high-level production of isoprenoids.” Metabolic Engineering, 9(2), 160-168. https://doi.org/10.1016/J.YMBEN.2006.10.005.
[0370] Sirikantaramas, S., Taura, F., Tanaka, Y., Ishikawa, Y., Morimoto, S., & Shoyama, Y. (2005). “Tetrahydrocannabinolic acid synthase, the enzyme controlling marijuana psychoactivity, is secreted into the storage cavity of the glandular trichomes”. Plant and Cell Physiology, 46(9), 1578-1582.
[0371] Stout, J. M., Boubakir, Z., Ambrose, S. J., Purves, R. W., & Page, J. E. (2012). The hexanoyl-CoA precursor for cannabinoid biosynthesis is formed by an acyl-activating enzyme in Cannabis sativa trichomes. The Plant Journal, 71(3), 353-365.
[0372] Taura, F., Morimoto, S., & Shoyama, Y. (1996). Purification and characterization of cannabidiolic-acid synthase from Cannabis sativa L. Biochemical analysis of a novel enzyme that catalyzes the oxidocyclization of cannabigerolic acid to cannabidiolic acid. Journal of Biological Chemistry, 271(29), 17411-17416.
[0373] van Hoek, Pim, et al. “Fermentative capacity in high-cell-density fed-batch cultures of baker's yeast.” Biotechnology and bioengineering 68.5 (2000): 517-523.
[0374] Varshavsky, A. (1996). The N-end rule: functions, mysteries, uses. Proceedings of the National Academy of Sciences, 93(22), 12142-12149.
[0375] Varshavsky, A. (2011). The N-end rule pathway and regulation by proteolysis. Protein Science 20(8):1285-1476. https://doi.org/10.1002/pro.666.
[0376] Wu, X-L., Li, B-Z., Zhang, W-Z., Kong, K., Qi, H., Dai, J-b., & Yuan, Y-J. (2017). Genome-Wide Landscape of Position Effects on Heterogeneous Gene Expression in Saccharomyces cerevisiae. Biotechnology for Biofuels. 10(189) https://doi.org/10.1186/s13068-017-0872-3.
[0377] Zamberletti, E., Rubino, T., & Parolaro, D. (2021). Therapeutic potential of cannabidivarin for epilepsy and autism spectrum disorder. Pharmacology & Therapeutics, 107878.

The application's sequence listing, which the Patent Office published only in electronic form, follows.

SEQUENCE LISTING (211 sequences)

SEQ ID NO: 1 - DNA, 7263 bp, Artificial Sequence
  OstI-pro-alpha-f(I)-OXC52
aagagtaaaaaattgtacttggcggataatgcctttagcggcttaactgtgccctccatggaaaaatcagtcaagatatccacatgtgtttttagtaaacaaattttgggacctaatgcttcaactaactccagtaattccttggtggtacgaacatccaatgaagcacacaagtttgtttgcttttcgtgcatgatattaaatagcttggcagcaacaggactaggatgagtagcagcacgttccttatatgtagctttcgacatgatttatcttcgtttcctgcaggtttttgttctgtgcagttgggttaagaatactgggcaatttcatgtttcttcaacactacatatgcgtatatataccaatctaagtctgtgctccttccttcgttcttccttctgttcggagattaccgaatcaaaaaaatttcaaagaaaccgaaatcaaaaaaaagaataaaaaaaaaatgatgaattgaattgaaaagctagcttatcgatgataagctgtcaaagatgagaattaattccacggactatagactatactagatactccgtctactgtacgatacacttccgctcaggtccttgtcctttaacgaggccttaccactcttttgttactctattgatccagctcagcaaaggcagtgtgatctaagattctatcttcgcgatgtagtaaaactagctagaccgagaaagagactagaaatgcaaaaggcacttctacaatggctgccatcattattatccgatgtgacgctgcagcttctcaatgatattcgaatacgctttgaggagatacagcctaatatccgacaaactgttttacagatttacgatcgtacttgttacccatcattgaattttgaacatccgaacctgggagttttccctgaaacagatagtatatttgaacctgtataataatatatagtctagcgctttacggaagacaatgtatgtatttcggttcctggagaaactattgcatctattgcataggtaatcttgcacgtcgcatccccggttcattttctgcgtttccatcttgcacttcaatagcatatctttgttcgcttgcctgtaacttacacgcgcctcgtatcttttaatgatggaataatttgggaatttactctgtgtttatttatttttatgttttgtatttggattttagaaagtaaataaagaaggtagaagagttacggaatgaagaaaaaaaaataaacaaaggtttaaaaaatttcaacaaaaagcgtactttacatatatatttattagacaagaaaagcagattaaatagatatacattcgattaacgataagtaaaatgtaaaatcacaggattttcgtgtgtggtcttctacacagacaagatgaaacaattcggcattaatacctgagagcaggaagagcaagataaaaggtagtatttgttggcgatccccctagagtcttttacatcttcggaaaacaaaaactattttttctttaatttctttttttactttctatttttaatttatatatttatattaaaaaatttaaattataattatttttatagcacgtgatgaaaaggaccgggaagctccaccccggttgataatcagaaaagccccaaaaacaggaagattgtataagcaaatatttaaattgtaaacgttaatattttgttaaaattcgcgttaaatttttgttaaatcagctcattttttaacgaatagcccgaaatcggcaaaatcccttataaatcaaaagaatagaccgagatagggttgagtgttgttccagtttccaacaagagtccactattaaagaacgtggactccaacgtcaaagggcgaaaaagggtctatcagggcgatggcccactacgtgaaccatcaccctaatcaagttttttggggtcgaggtgccgtaaagcagtaaatcggaagggtaaacggatgcccccatttagagcttgacggggaaagccggcgaacgtggcgagaaaggaagggaagaaagcgaaaggagcgggggctagggcggtgggaagtgtaggggtcacgctgggcgtaaccaccacacccgccgcgcttaatggggcgctacagggcgcgtggggatgatccactagtacggattagaagccgccgagcgggtgacagccctccgaaggaagactctcctccgtgcgtcctcgtcttcaccggtcgcgttcctgaaacgcagatgtgcctcgcgccgcactgctccgaacaataaagattctacaatactagcttttatggttatgaagaggaaaaattggcagtaacctggccccacaaaccttcaaatgaacgaatcaaattaacaaccataggatgataatgcgattagttttttagccttatttctggggtaattaatcagcgaagcgatgatttttgatctattaacagatatataaatgcaaaaactgcataaccactttaactaatactttcaacattttcggtttgtattacttcttattcaaatgtaataaaagtatcaacaaaaaattgttaatatacctctatactttaacgtcaaggagaaaaaaccccggatcggactactagcagctgtaatacgactcactatagggaatattaagcttaaacaatgaggcaggtttggttctcttggattgtgggattgttcctatgttttttcaacgtgtcttctgctgctccagtcaacactacaacagaagatgaaacggcacaaattccggctgaagctgtcatcggttactcagatttagaaggggatttcgatgttgctgttttgccattttccaacagcacaaataacgggttattgtttataaatactactattgccagcattgctgctaaagaagaaggggtatctctcgagaaaagagaggctgaagctatgccaggggaaaacttcttgaagtgcttctcccaatatatcccaaacaacgctactaacttaaagttagtttacactcaaaacaatccattatacatgtctgtcttaaactctactattcataacttaagatttacttccgatactacccctaagccattggttatcgtcaccccatctcacgtctcccatatccaaggtactatcttatgttctaagaaggttggtttgcaaatccgtactagatctggtggtcacgactctgaaggtatgtcctatatctctcaagtcccatttgtcattgttgacttaagaaatatgagatccattaaaattgatgttcattctcaaactgcttgggtcgaagctggtgccaccttgggtgaagtttactactgggtcaacgaaaaaaacgaaaacttatctttagctgccggttactgtccaaccgtctgtgctggtggtcatttcggtggtggtggttacggtccattgatgcgtaactacggtttagctgctgacaacattattgacgctcatttagttaatgttcacggtaaggttttggacagaaaatctatgggtgaagatttattttgggccttgagaggtggtggtgctgaatccttcggtatcatcgttgcctggaagattcgtttagttgctgtccctaagtccaccatgttctccgtcaagaaaatcatggaaattcatgagttggtcaaattggttaacaagtggcaaaacatcgcttacaagtatgacaaggatttgttgttaatgactcacttcatcacccgtaatatcaccgacaaccaaggtaagaacaaaactgctattcacacctacttctcctccgtttttttgggtggtgtcgactccttagtcgatttgatgaacaaatcctttccagaattgggtattaagaaaactgattgtagacaattgtcttggattgacaccattatcttctattctggtgtcgttaactacgacaccgacaactttaacaaggaaattttgttggatcgttctgctggtcaaaatggtgccttcaaaatcaaattggactacgtcaaaaagccaatcccagaatctgttttcgttcaaattttggaaaagttgtacgaagaagacattggtgccggtatgtatgctttgtatccatatggtggtatcatggacgaaatttccgaatctgccatcccattcccacacagagctggtattttatatgaattgtggtacatctgttcttgggaaaagcaagaagacaacgaaaagcatttaaactggattagaaacatttacaacttcatgaccccatacgtttctaagaacccaagattagcctatttgaactaccgtgacttagatattggtattaatgacccaaagaacccaaacaactatactcaagccagaatttggggtgaaaagtacttcggtaagaacttcgatagattagttaaggttaaaactttggtcgatccaaacaacttcttcagaaacgaacaatccatcccaccattgccaagacatcgtcacggccatcatcaccatcaccattagctcgagcatgcatctagagggccgcatcatgtaattagttatgtcacgcttacattcacgccctccccccacatccgctctaaccgaaaaggaaggagttagacaacctgaagtctaggtccctatttatttttttatagttatgttagtattaagaacgttatttatatttcaaatttttcttttttttctgtacagacgcgtgtacgcatgtaacattatactgaaaaccttgcttgagaaggttttgggacgctcgaaggctttaatttgcggccctgcattaatgaatcggccaacgcgcggggagaggcggtttgcgtattgggcgctcttccgcttcctcgctcactgactcgctgcgctcggtcgttcggctgcggcgagcggtatcagctcactcaaaggcggtaatacggttatccacagaatcaggggataacgcaggaaagaacatgtgagcaaaaggccagcaaaagcccaggaaccgtaaaaaggccgcgttgctggcgtttttccataggctccgcccccctgacgagcatcacaaaaatcgacgctcaagtcagaggtggcgaaacccgacaggactataaagataccaggcgtttccccctggaagctccctcgtgcgctctcctgttccgaccctgccgcttaccggatacctgtccgcctttctcccttcgggaagcgtggcgctttctcatagctcacgctgtaggtatctcagttcggtgtaggtcgttcgctccaagctgggctgtgtgcacgaaccccccgttcagcccgaccgctgcgccttatccggtaactatcgtcttgagtccaacccggtaagacacgacttatcgccactggcagcagccactggtaacaggattagcagagcgaggtatgtaggcggtgctacagagttcttgaagtggtggcctaactacggctacactagaagaacagtatttggtatctgcgctctgctgaagccagttaccttcggaaaaagagttggtagctcttgatccggcaaacaaaccaccgctggtagcggtggtttttttgtttgcaagcagcagattacgcgcagaaaaaaaggatctcaagaagatcctttgatcttttctacggggtctgacgctcagtggaacgaaaactcacgttaagggattttggtcatgagattatcaaaaaggatcttcacctagatccttttaaattaaaaatgaagttttaaatcaatctaaagtatatatgagtaaacttggtctgacagttaccaatgcttaatcagtgaggcacctatctcagcgatctgtctatttcgttcatccatagttgcctgactccccgtcgtgtagataactacgatacgggagcgcttaccatctggccccagtgctgcaatgataccgcgagacccacgctcaccggctccagatttatcagcaataaaccagccagccggaagggccgagcgcagaagtggtcctgcaactttatccgcctccattcagtctattaattgttgccgggaagctagagtaagtagttcgccagttaatagtttgcgcaacgttgttggcattgctacaggcatcgtggtgtcactctcgtcgtttggtatggcttcattcagctccggttcccaacgatcaaggcgagttacatgatcccccatgttgtgcaaaaaagcggttagctccttcggtcctccgatcgttgtcagaagtaagttggccgcagtgttatcactcatggttatggcagcactgcataattctcttactgtcatgccatccgtaagatgcttttctgtgactggtgagtactcaaccaagtcattctgagaatagtgtatgcggcgaccgagttgctcttgcccggcgtcaatacgggataatagtgtatcacatagcagaactttaaaagtgctcatcattggaaaacgttcttcggggcgaaaactctcaaggatcttaccgctgttgagatccagttcgatgtaacccactcgtgcacccaactgatcttcagcatcttttactttcaccagcgtttctgggtgagcaaaaacaggaaggcaaaatgccgcaaaaaagggaataagggcgacacggaaatgttgaatactcatactcttcctttttcaatgggtaataactgatataattaaattgaagctctaatttgtgagtttagtatacatgcatttacttataatacagttttttagttttgctggccgcatcttctcaaatatgcttcccagcctgcttttctgtaacgttcaccctctaccttagcatcccttccctttgcaaatagtcctcttccaacaataataatgtcagatcctgtagagaccacatcatccacggttctatactgttgacccaatgcgtctcccttgtcatctaaacccacaccgggtgtcataatcaaccaatcgtaaccttcatctcttccacccatgtctctttgagcaataaagccgataacaaaatctttgtcgctcttcgcaatgtcaacagtacccttagtatattctccagtagatagggagcccttgcatgacaattctgctaacatcaaaaggcctctaggttcctttgttacttcttctgccgcctgcttcaaaccgctaacaatacctgggcccaccacaccgtgtgcattcgtaatgtctgcccattctgctattctgtatacacccgcagagtactgcaatttgactgtattaccaatgtcagcaaattttctgtcttcg

SEQ ID NO: 2 - DNA, 7266 bp, Artificial Sequence
  OstI-pro-alpha-f(I)-OXC154
aagagtaaaaaattgtacttggcggataatgcctttagcggcttaactgtgccctccatggaaaaatcagtcaagatatccacatgtgtttttagtaaacaaattttgggacctaatgcttcaactaactccagtaattccttggtggtacgaacatccaatgaagcacacaagtttgtttgcttttcgtgcatgatattaaatagcttggcagcaacaggactaggatgagtagcagcacgttccttatatgtagctttcgacatgatttatcttcgtttcctgcaggtttttgttctgtgcagttgggttaagaatactgggcaatttcatgtttcttcaacactacatatgcgtatatataccaatctaagtctgtgctccttccttcgttcttccttctgttcggagattaccgaatcaaaaaaatttcaaagaaaccgaaatcaaaaaaaagaataaaaaaaaaatgatgaattgaattgaaaagctagcttatcgatgataagctgtcaaagatgagaattaattccacggactatagactatactagatactccgtctactgtacgatacacttccgctcaggtccttgtcctttaacgaggccttaccactcttttgttactctattgatccagctcagcaaaggcagtgtgatctaagattctatcttcgcgatgtagtaaaactagctagaccgagaaagagactagaaatgcaaaaggcacttctacaatggctgccatcattattatccgatgtgacgctgcagcttctcaatgatattcgaatacgctttgaggagatacagcctaatatccgacaaactgttttacagatttacgatcgtacttgttacccatcattgaattttgaacatccgaacctgggagttttccctgaaacagatagtatatttgaacctgtataataatatatagtctagcgctttacggaagacaatgtatgtatttcggttcctggagaaactattgcatctattgcataggtaatcttgcacgtcgcatccccggttcattttctgcgtttccatcttgcacttcaatagcatatctttgttcgcttgcctgtaacttacacgcgcctcgtatcttttaatgatggaataatttgggaatttactctgtgtttatttatttttatgttttgtatttggattttagaaagtaaataaagaaggtagaagagttacggaatgaagaaaaaaaaataaacaaaggtttaaaaaatttcaacaaaaagcgtactttacatatatatttattagacaagaaaagcagattaaatagatatacattcgattaacgataagtaaaatgtaaaatcacaggattttcgtgtgtggtcttctacacagacaagatgaaacaattcggcattaatacctgagagcaggaagagcaagataaaaggtagtatttgttggcgatccccctagagtcttttacatcttcggaaaacaaaaactattttttctttaatttctttttttactttctatttttaatttatatatttatattaaaaaatttaaattataattatttttatagcacgtgatgaaaaggaccgggaagctccaccccggttgataatcagaaaagccccaaaaacaggaagattgtataagcaaatatttaaattgtaaacgttaatattttgttaaaattcgcgttaaatttttgttaaatcagctcattttttaacgaatagcccgaaatcggcaaaatcccttataaatcaaaagaatagaccgagatagggttgagtgttgttccagtttccaacaagagtccactattaaagaacgtggactccaacgtcaaagggcgaaaaagggtctatcagggcgatggcccactacgtgaaccatcaccctaatcaagttttttggggtcgaggtgccgtaaagcagtaaatcggaagggtaaacggatgcccccatttagagcttgacggggaaagccggcgaacgtggcgagaaaggaagggaagaaagcgaaaggagcgggggctagggcggtgggaagtgtaggggtcacgctgggcgtaaccaccacacccgccgcgcttaatggggcgctacagggcgcgtggggatgatccactagtacggattagaagccgccgagcgggtgacagccctccgaaggaagactctcctccgtgcgtcctcgtcttcaccggtcgcgttcctgaaacgcagatgtgcctcgcgccgcactgctccgaacaataaagattctacaatactagcttttatggttatgaagaggaaaaattggcagtaacctggccccacaaaccttcaaatgaacgaatcaaattaacaaccataggatgataatgcgattagttttttagccttatttctggggtaattaatcagcgaagcgatgatttttgatctattaacagatatataaatgcaaaaactgcataaccactttaactaatactttcaacattttcggtttgtattacttcttattcaaatgtaataaaagtatcaacaaaaaattgttaatatacctctatactttaacgtcaaggagaaaaaaccccggatcggactactagcagctgtaatacgactcactatagggaatattaagcttaaacaatgaggcaggtttggttctcttggattgtgggattgttcctatgttttttcaacgtgtcttctgctgctccagtcaacactacaacagaagatgaaacggcacaaattccggctgaagctgtcatcggttactcagatttagaaggggatttcgatgttgctgttttgccattttccaacagcacaaataacgggttattgtttataaatactactattgccagcattgctgctaaagaagaaggggtatctctcgagaaaagagaggctgaagctatgccaagagaaaacttcttgaagtgcttctcccaatatatcccaaacaacgctactaacttaaagttagtttacactcaaaacaatccattatacatgtctgtcttaaactctactattcataacttaagatttacttccgatactacccctaagccattggttatcgtcaccccatctcacgtctcccatatccaaggtactatcttatgttctaagaaggttggtttgcaaatccgtactagatctggtggtcacgactctgaaggtatgtcctatatctctcaagtcccatttgtcattgttgacttaagaaatatgagatccattaaaattgatgttcattctcaaactgcttgggtcgaagctggtgccaccttgggtgaagtttactactgggtcaacgaaaaaaacgaaaacttatctttagctgccggttactgtccaaccgtctgtgctggtggtcatttcggtggtggtggttacggtccattgatgcgtaactacggtttagctgctgacaacattattgacgctcatttagttaatgttcacggtaaggttttggacagaaaatctatgggtgaagatttattttgggccttgagaggtggtggtgctgaatccttcggtatcatcgttgcctggaagattcgtttagttgctgtcccttctaagtccaccatgttctccgtcaagaaaatcatggaaattcatgagttggtcaaattggttaacaagtggcaaaacatcgcttacaagtatgacaaggatttgttgttaatgactcacttcatcacccgtaatatcaccgacaaccaaggtaagaacaaaactgctattcacacctacttctcctccgtttttttgggtggtgtcgactccttagtcgatttgatgaacaaatcctttccagaattgggtattaagaaaactgattgtagacaattgtcttggattgacaccattatcttctattctggtgtcgttaactacgacaccgacaactttaacaaggaaattttgttggatcgttctgctggtcaaaatggtgccttcaaaatcaaattggactacgtcaaaaagccaatcccagaatctgttttcgttcaaattttggaaaagttgtacgaagaagacattggtgccggtatgtatgctttgtatccatatggtggtatcatggacgaaatttccgaatctgccatcccattcccacacagagctggtattttatatgaattgtggtacatctgttcttgggaaaagcaagaagacaacgaaaagcatttaaactggattagaaacatttacaacttcatgaccccatacgtttctaagaacccaagattagcctatttgaactaccgtgacttagatattggtattaatgacccaaagaacccaaacaactatactcaagccagaatttggggtgaaaagtacttcggtaagaacttcgatagattagttaaggttaaaactttggtcgatccaaacaacttcttcagaaacgaacaatccatcccaccattgccaagacatcgtcacggccatcatcaccatcaccattagctcgagcatgcatctagagggccgcatcatgtaattagttatgtcacgcttacattcacgccctccccccacatccgctctaaccgaaaaggaaggagttagacaacctgaagtctaggtccctatttatttttttatagttatgttagtattaagaacgttatttatatttcaaatttttcttttttttctgtacagacgcgtgtacgcatgtaacattatactgaaaaccttgcttgagaaggttttgggacgctcgaaggctttaatttgcggccctgcattaatgaatcggccaacgcgcggggagaggcggtttgcgtattgggcgctcttccgcttcctcgctcactgactcgctgcgctcggtcgttcggctgcggcgagcggtatcagctcactcaaaggcggtaatacggttatccacagaatcaggggataacgcaggaaagaacatgtgagcaaaaggccagcaaaagcccaggaaccgtaaaaaggccgcgttgctggcgtttttccataggctccgcccccctgacgagcatcacaaaaatcgacgctcaagtcagaggtggcgaaacccgacaggactataaagataccaggcgtttccccctggaagctccctcgtgcgctctcctgttccgaccctgccgcttaccggatacctgtccgcctttctcccttcgggaagcgtggcgctttctcatagctcacgctgtaggtatctcagttcggtgtaggtcgttcgctccaagctgggctgtgtgcacgaaccccccgttcagcccgaccgctgcgccttatccggtaactatcgtcttgagtccaacccggtaagacacgacttatcgccactggcagcagccactggtaacaggattagcagagcgaggtatgtaggcggtgctacagagttcttgaagtggtggcctaactacggctacactagaagaacagtatttggtatctgcgctctgctgaagccagttaccttcggaaaaagagttggtagctcttgatccggcaaacaaaccaccgctggtagcggtggtttttttgtttgcaagcagcagattacgcgcagaaaaaaaggatctcaagaagatcctttgatcttttctacggggtctgacgctcagtggaacgaaaactcacgttaagggattttggtcatgagattatcaaaaaggatcttcacctagatccttttaaattaaaaatgaagttttaaatcaatctaaagtatatatgagtaaacttggtctgacagttaccaatgcttaatcagtgaggcacctatctcagcgatctgtctatttcgttcatccatagttgcctgactccccgtcgtgtagataactacgatacgggagcgcttaccatctggccccagtgctgcaatgataccgcgagacccacgctcaccggctccagatttatcagcaataaaccagccagccggaagggccgagcgcagaagtggtcctgcaactttatccgcctccattcagtctattaattgttgccgggaagctagagtaagtagttcgccagttaatagtttgcgcaacgttgttggcattgctacaggcatcgtggtgtcactctcgtcgtttggtatggcttcattcagctccggttcccaacgatcaaggcgagttacatgatcccccatgttgtgcaaaaaagcggttagctccttcggtcctccgatcgttgtcagaagtaagttggccgcagtgttatcactcatggttatggcagcactgcataattctcttactgtcatgccatccgtaagatgcttttctgtgactggtgagtactcaaccaagtcattctgagaatagtgtatgcggcgaccgagttgctcttgcccggcgtcaatacgggataatagtgtatcacatagcagaactttaaaagtgctcatcattggaaaacgttcttcggggcgaaaactctcaaggatcttaccgctgttgagatccagttcgatgtaacccactcgtgcacccaactgatcttcagcatcttttactttcaccagcgtttctgggtgagcaaaaacaggaaggcaaaatgccgcaaaaaagggaataagggcgacacggaaatgttgaatactcatactcttcctttttcaatgggtaataactgatataattaaattgaagctctaatttgtgagtttagtatacatgcatttacttataatacagttttttagttttgctggccgcatcttctcaaatatgcttcccagcctgcttttctgtaacgttcaccctctaccttagcatcccttccctttgcaaatagtcctcttccaacaataataatgtcagatcctgtagagaccacatcatccacggttctatactgttgacccaatgcgtctcccttgtcatctaaacccacaccgggtgtcataatcaaccaatcgtaaccttcatctcttccacccatgtctctttgagcaataaagccgataacaaaatctttgtcgctcttcgcaatgtcaacagtacccttagtatattctccagtagatagggagcccttgcatgacaattctgctaacatcaaaaggcctctaggttcctttgttacttcttctgccgcctgcttcaaaccgctaacaatacctgggcccaccacaccgtgtgcattcgtaatgtctgcccattctgctattctgtatacacccgcagagtactgcaatttgactgtattaccaatgtcagcaaattttctgtcttcg

SEQ ID NO: 3 - DNA, 6114 bp, Artificial Sequence
  RFP mScarlet
aagagtaaaaaattgtacttggcggataatgcctttagcggcttaactgtgccctccatggaaaaatcagtcaagatatccacatgtgtttttagtaaacaaattttgggacctaatgcttcaactaactccagtaattccttggtggtacgaacatccaatgaagcacacaagtttgtttgcttttcgtgcatgatattaaatagcttggcagcaacaggactaggatgagtagcagcacgttccttatatgtagctttcgacatgatttatcttcgtttcctgcaggtttttgttctgtgcagttgggttaagaatactgggcaatttcatgtttcttcaacactacatatgcgtatatataccaatctaagtctgtgctccttccttcgttcttccttctgttcggagattaccgaatcaaaaaaatttcaaagaaaccgaaatcaaaaaaaagaataaaaaaaaaatgatgaattgaattgaaaagctagcttatcgatgataagctgtcaaagatgagaattaattccacggactatagactatactagatactccgtctactgtacgatacacttccgctcaggtccttgtcctttaacgaggccttaccactcttttgttactctattgatccagctcagcaaaggcagtgtgatctaagattctatcttcgcgatgtagtaaaactagctagaccgagaaagagactagaaatgcaaaaggcacttctacaatggctgccatcattattatccgatgtgacgctgcagcttctcaatgatattcgaatacgctttgaggagatacagcctaatatccgacaaactgttttacagatttacgatcgtacttgttacccatcattgaattttgaacatccgaacctgggagttttccctgaaacagatagtatatttgaacctgtataataatatatagtctagcgctttacggaagacaatgtatgtatttcggttcctggagaaactattgcatctattgcataggtaatcttgcacgtcgcatccccggttcattttctgcgtttccatcttgcacttcaatagcatatctttgttcgcttgcctgtaacttacacgcgcctcgtatcttttaatgatggaataatttgggaatttactctgtgtttatttatttttatgttttgtatttggattttagaaagtaaataaagaaggtagaagagttacggaatgaagaaaaaaaaataaacaaaggtttaaaaaatttcaacaaaaagcgtactttacatatatatttattagacaagaaaagcagattaaatagatatacattcgattaacgataagtaaaatgtaaaatcacaggattttcgtgtgtggtcttctacacagacaagatgaaacaattcggcattaatacctgagagcaggaagagcaagataaaaggtagtatttgttggcgatccccctagagtcttttacatcttcggaaaacaaaaactattttttctttaatttctttttttactttctatttttaatttatatatttatattaaaaaatttaaattataattatttttatagcacgtgatgaaaaggaccgggaagctccaccccggttgataatcagaaaagccccaaaaacaggaagattgtataagcaaatatttaaattgtaaacgttaatattttgttaaaattcgcgttaaatttttgttaaatcagctcattttttaacgaatagcccgaaatcggcaaaatcccttataaatcaaaagaatagaccgagatagggttgagtgttgttccagtttccaacaagagtccactattaaagaacgtggactccaacgtcaaagggcgaaaaagggtctatcagggcgatggcccactacgtgaaccatcaccctaatcaagttttttggggtcgaggtgccgtaaagcagtaaatcggaagggtaaacggatgcccccatttagagcttgacggggaaagccggcgaacgtggcgagaaaggaagggaagaaagcgaaaggagcgggggctagggcggtgggaagtgtaggggtcacgctgggcgtaaccaccacacccgccgcgcttaatggggcgctacagggcgcgtggggatgatccactagtacggattagaagccgccgagcgggtgacagccctccgaaggaagactctcctccgtgcgtcctcgtcttcaccggtcgcgttcctgaaacgcagatgtgcctcgcgccgcactgctccgaacaataaagattctacaatactagcttttatggttatgaagaggaaaaattggcagtaacctggccccacaaaccttcaaatgaacgaatcaaattaacaaccataggatgataatgcgattagttttttagccttatttctggggtaattaatcagcgaagcgatgatttttgatctattaacagatatataaatgcaaaaactgcataaccactttaactaatactttcaacattttcggtttgtattacttcttattcaaatgtaataaaagtatcaacaaaaaattgttaatatacctctatactttaacgtcaaggagaaaaaaccccggatcggactactagcagctgtaatacgactcactatagggaatattaagcttaaacaatggtgtctaaaggtgaagccgtcatcaaagaattcatgagattcaaggttcacatggaaggttctatgaatggtcacgaattcgaaattgaaggtgaaggtgagggtagaccatatgaaggtactcaaactgctaagttgaaggttacaaaaggtggtccattgccattctcttgggatattttgtctccacaattcatgtacggttctagagcttttacaaaacacccagctgatatcccagattactacaagcaatcatttccagagggtttcaagtgggaaagagttatgaattttgaagatggtggtgccgttactgttactcaagatacttctttggaagatggcaccttgatctacaaggttaagttgagaggtactaatttcccaccagatggtccagttatgcaaaaaaagactatgggttgggaagctagtactgaaagattatatccagaggatggtgttttgaagggtgatattaagatggccttgagattgaaagacggtggtagatatttggctgatttcaagactacttacaaggccaaaaagccagttcaaatgccaggtgcttataacgttgatagaaagttggatatcacctctcacaacgaagattacaccgttgttgaacagtacgaaagatctgaaggtagacattctactggtggtatggatgagttgtacaagtaactcgagcatgcatctagagggccgcatcatgtaattagttatgtcacgcttacattcacgccctccccccacatccgctctaaccgaaaaggaaggagttagacaacctgaagtctaggtccctatttatttttttatagttatgttagtattaagaacgttatttatatttcaaatttttcttttttttctgtacagacgcgtgtacgcatgtaacattatactgaaaaccttgcttgagaaggttttgggacgctcgaaggctttaatttgcggccctgcattaatgaatcggccaacgcgcggggagaggcggtttgcgtattgggcgctcttccgcttcctcgctcactgactcgctgcgctcggtcgttcggctgcggcgagcggtatcagctcactcaaaggcggtaatacggttatccacagaatcaggggataacgcaggaaagaacatgtgagcaaaaggccagcaaaagcccaggaaccgtaaaaaggccgcgttgctggcgtttttccataggctccgcccccctgacgagcatcacaaaaatcgacgctcaagtcagaggtggcgaaacccgacaggactataaagataccaggcgtttccccctggaagctccctcgtgcgctctcctgttccgaccctgccgcttaccggatacctgtccgcctttctcccttcgggaagcgtggcgctttctcatagctcacgctgtaggtatctcagttcggtgtaggtcgttcgctccaagctgggctgtgtgcacgaaccccccgttcagcccgaccgctgcgccttatccggtaactatcgtcttgagtccaacccggtaagacacgacttatcgccactggcagcagccactggtaacaggattagcagagcgaggtatgtaggcggtgctacagagttcttgaagtggtggcctaactacggctacactagaagaacagtatttggtatctgcgctctgctgaagccagttaccttcggaaaaagagttggtagctcttgatccggcaaacaaaccaccgctggtagcggtggtttttttgtttgcaagcagcagattacgcgcagaaaaaaaggatctcaagaagatcctttgatcttttctacggggtctgacgctcagtggaacgaaaactcacgttaagggattttggtcatgagattatcaaaaaggatcttcacctagatccttttaaattaaaaatgaagttttaaatcaatctaaagtatatatgagtaaacttggtctgacagttaccaatgcttaatcagtgaggcacctatctcagcgatctgtctatttcgttcatccatagttgcctgactccccgtcgtgtagataactacgatacgggagcgcttaccatctggccccagtgctgcaatgataccgcgagacccacgctcaccggctccagatttatcagcaataaaccagccagccggaagggccgagcgcagaagtggtcctgcaactttatccgcctccattcagtctattaattgttgccgggaagctagagtaagtagttcgccagttaatagtttgcgcaacgttgttggcattgctacaggcatcgtggtgtcactctcgtcgtttggtatggcttcattcagctccggttcccaacgatcaaggcgagttacatgatcccccatgttgtgcaaaaaagcggttagctccttcggtcctccgatcgttgtcagaagtaagttggccgcagtgttatcactcatggttatggcagcactgcataattctcttactgtcatgccatccgtaagatgcttttctgtgactggtgagtactcaaccaagtcattctgagaatagtgtatgcggcgaccgagttgctcttgcccggcgtcaatacgggataatagtgtatcacatagcagaactttaaaagtgctcatcattggaaaacgttcttcggggcgaaaactctcaaggatcttaccgctgttgagatccagttcgatgtaacccactcgtgcacccaactgatcttcagcatcttttactttcaccagcgtttctgggtgagcaaaaacaggaaggcaaaatgccgcaaaaaagggaataagggcgacacggaaatgttgaatactcatactcttcctttttcaatgggtaataactgatataattaaattgaagctctaatttgtgagtttagtatacatgcatttacttataatacagttttttagttttgctggccgcatcttctcaaatatgcttcccagcctgcttttctgtaacgttcaccctctaccttagcatcccttccctttgcaaatagtcctcttccaacaataataatgtcagatcctgtagagaccacatcatccacggttctatactgttgacccaatgcgtctcccttgtcatctaaacccacaccgggtgtcataatcaaccaatcgtaaccttcatctcttccacccatgtctctttgagcaataaagccgataacaaaatctttgtcgctcttcgcaatgtcaacagtacccttagtatattctccagtagatagggagcccttgcatgacaattctgctaacatcaaaaggcctctaggttcctttgttacttcttctgccgcctgcttcaaaccgctaacaatacctgggcccaccacaccgtgtgcattcgtaatgtctgcccattctgctattctgtatacacccgcagagtactgcaatttgactgtattaccaatgtcagcaaattttctgtcttcg

SEQ ID NO: 4 - DNA, 7266 bp, Artificial Sequence
  OXC154-S88A/L451G
aagagtaaaaaattgtacttggcggataatgcctttagcggcttaactgtgccctccatggaaaaatcagtcaagatatccacatgtgtttttagtaaacaaattttgggacctaatgcttcaactaactccagtaattccttggtggtacgaacatccaatgaagcacacaagtttgtttgcttttcgtgcatgatattaaatagcttggcagcaacaggactaggatgagtagcagcacgttccttatatgtagctttcgacatgatttatcttcgtttcctgcaggtttttgttctgtgcagttgggttaagaatactgggcaatttcatgtttcttcaacactacatatgcgtatatataccaatctaagtctgtgctccttccttcgttcttccttctgttcggagattaccgaatcaaaaaaatttcaaagaaaccgaaatcaaaaaaaagaataaaaaaaaaatgatgaattgaattgaaaagctagcttatcgatgataagctgtcaaagatgagaattaattccacggactatagactatactagatactccgtctactgtacgatacacttccgctcaggtccttgtcctttaacgaggccttaccactcttttgttactctattgatccagctcagcaaaggcagtgtgatctaagattctatcttcgcgatgtagtaaaactagctagaccgagaaagagactagaaatgcaaaaggcacttctacaatggctgccatcattattatccgatgtgacgctgcagcttctcaatgatattcgaatacgctttgaggagatacagcctaatatccgacaaactgttttacagatttacgatcgtacttgttacccatcattgaattttgaacatccgaacctgggagttttccctgaaacagatagtatatttgaacctgtataataatatatagtctagcgctttacggaagacaatgtatgtatttcggttcctggagaaactattgcatctattgcataggtaatcttgcacgtcgcatccccggttcattttctgcgtttccatcttgcacttcaatagcatatctttgttcgcttgcctgtaacttacacgcgcctcgtatcttttaatgatggaataatttgggaatttactctgtgtttatttatttttatgttttgtatttggattttagaaagtaaataaagaaggtagaagagttacggaatgaagaaaaaaaaataaacaaaggtttaaaaaatttcaacaaaaagcgtactttacatatatatttattagacaagaaaagcagattaaatagatatacattcgattaacgataagtaaaatgtaaaatcacaggattttcgtgtgtggtcttctacacagacaagatgaaacaattcggcattaatacctgagagcaggaagagcaagataaaaggtagtatttgttggcgatccccctagagtcttttacatcttcggaaaacaaaaactattttttctttaatttctttttttactttctatttttaatttatatatttatattaaaaaatttaaattataattatttttatagcacgtgatgaaaaggaccgggaagctccaccccggttgataatcagaaaagccccaaaaacaggaagattgtataagcaaatatttaaattgtaaacgttaatattttgttaaaattcgcgttaaatttttgttaaatcagctcattttttaacgaatagcccgaaatcggcaaaatcccttataaatcaaaagaatagaccgagatagggttgagtgttgttccagtttccaacaagagtccactattaaagaacgtggactccaacgtcaaagggcgaaaaagggtctatcagggcgatggcccactacgtgaaccatcaccctaatcaagttttttggggtcgaggtgccgtaaagcagtaaatcggaagggtaaacggatgcccccatttagagcttgacggggaaagccggcgaacgtggcgagaaaggaagggaagaaagcgaaaggagcgggggctagggcggtgggaagtgtaggggtcacgctgggcgtaaccaccacacccgccgcgcttaatggggcgctacagggcgcgtggggatgatccactagtacggattagaagccgccgagcgggtgacagccctccgaaggaagactctcctccgtgcgtcctcgtcttcaccggtcgcgttcctgaaacgcagatgtgcctcgcgccgcactgctccgaacaataaagattctacaatactagcttttatggttatgaagaggaaaaattggcagtaacctggccccacaaaccttcaaatgaacgaatcaaattaacaaccataggatgataatgcgattagttttttagccttatttctggggtaattaatcagcgaagcgatgatttttgatctattaacagatatataaatgcaaaaactgcataaccactttaactaatactttcaacattttcggtttgtattacttcttattcaaatgtaataaaagtatcaacaaaaaattgttaatatacctctatactttaacgtcaaggagaaaaaaccccggatcggactactagcagctgtaatacgactcactatagggaatattaagcttaaacaatgaggcaggtttggttctcttggattgtgggattgttcctatgttttttcaacgtgtcttctgctgctccagtcaacactacaacagaagatgaaacggcacaaattccggctgaagctgtcatcggttactcagatttagaaggggatttcgatgttgctgttttgccattttccaacagcacaaataacgggttattgtttataaatactactattgccagcattgctgctaaagaagaaggggtatctctcgagaaaagagaggctgaagctatgccaggggaaaacttcttgaagtgcttctcccaatatatcccaaacaacgctactaacttaaagttagtttacactcaaaacaatccattatacatgtctgtcttaaactctactattcataacttaagatttacttccgatactacccctaagccattggttatcgtcaccccatctcacgtctcccatatccaaggtactatcttatgttctaagaaggttggtttgcaaatccgtactagatctggtggtcacgacgctgaaggtatgtcctatatctctcaagtcccatttgtcattgttgacttaagaaatatgagatccattaaaattgatgttcattctcaaactgcttgggtcgaagctggtgccaccttgggtgaagtttactactgggtcaacgaaaaaaacgaaaacttatctttagctgccggttactgtccaaccgtctgtgctggtggtcatttcggtggtggtggttacggtccattgatgcgtaactacggtttagctgctgacaacattattgacgctcatttagttaatgttcacggtaaggttttggacagaaaatctatgggtgaagatttattttgggccttgagaggtggtggtgctgaatccttcggtatcatcgttgcctggaagattcgtttagttgctgtcccttctaagtccaccatgttctccgtcaagaaaatcatggaaattcatgagttggtcaaattggttaacaagtggcaaaacatcgcttacaagtatgacaaggatttgttgttaatgactcacttcatcacccgtaatatcaccgacaaccaaggtaagaacaaaactgctattcacacctacttctcctccgtttttttgggtggtgtcgactccttagtcgatttgatgaacaaatcctttccagaattgggtattaagaaaactgattgtagacaattgtcttggattgacaccattatcttctattctggtgtcgttaactacgacaccgacaactttaacaaggaaattttgttggatcgttctgctggtcaaaatggtgccttcaaaatcaaattggactacgtcaaaaagccaatcccagaatctgttttcgttcaaattttggaaaagttgtacgaagaagacattggtgccggtatgtatgctttgtatccatatggtggtatcatggacgaaatttccgaatctgccatcccattcccacacagagctggtattttatatgaattgtggtacatctgttcttgggaaaagcaagaagacaacgaaaagcatttaaactggattagaaacatttacaacttcatgaccccatacgtttctaagaacccaagaggcgcctatttgaactaccgtgacttagatattggtattaatgacccaaagaacccaaacaactatactcaagccagaatttggggtgaaaagtacttcggtaagaacttcgatagattagttaaggttaaaactttggtcgatccaaacaacttcttcagaaacgaacaatccatcccaccattgccaagacatcgtcacggccatcatcaccatcaccattagctcgagcatgcatctagagggccgcatcatgtaattagttatgtcacgcttacattcacgccctccccccacatccgctctaaccgaaaaggaaggagttagacaacctgaagtctaggtccctatttatttttttatagttatgttagtattaagaacgttatttatatttcaaatttttcttttttttctgtacagacgcgtgtacgcatgtaacattatactgaaaaccttgcttgagaaggttttgggacgctcgaaggctttaatttgcggccctgcattaatgaatcggccaacgcgcggggagaggcggtttgcgtattgggcgctcttccgcttcctcgctcactgactcgctgcgctcggtcgttcggctgcggcgagcggtatcagctcactcaaaggcggtaatacggttatccacagaatcaggggataacgcaggaaagaacatgtgagcaaaaggccagcaaaagcccaggaaccgtaaaaaggccgcgttgctggcgtttttccataggctccgcccccctgacgagcatcacaaaaatcgacgctcaagtcagaggtggcgaaacccgacaggactataaagataccaggcgtttccccctggaagctccctcgtgcgctctcctgttccgaccctgccgcttaccggatacctgtccgcctttctcccttcgggaagcgtggcgctttctcatagctcacgctgtaggtatctcagttcggtgtaggtcgttcgctccaagctgggctgtgtgcacgaaccccccgttcagcccgaccgctgcgccttatccggtaactatcgtcttgagtccaacccggtaagacacgacttatcgccactggcagcagccactggtaacaggattagcagagcgaggtatgtaggcggtgctacagagttcttgaagtggtggcctaactacggctacactagaagaacagtatttggtatctgcgctctgctgaagccagttaccttcggaaaaagagttggtagctcttgatccggcaaacaaaccaccgctggtagcggtggtttttttgtttgcaagcagcagattacgcgcagaaaaaaaggatctcaagaagatcctttgatcttttctacggggtctgacgctcagtggaacgaaaactcacgttaagggattttggtcatgagattatcaaaaaggatcttcacctagatccttttaaattaaaaatgaagttttaaatcaatctaaagtatatatgagtaaacttggtctgacagttaccaatgcttaatcagtgaggcacctatctcagcgatctgtctatttcgttcatccatagttgcctgactccccgtcgtgtagataactacgatacgggagcgcttaccatctggccccagtgctgcaatgataccgcgagacccacgctcaccggctccagatttatcagcaataaaccagccagccggaagggccgagcgcagaagtggtcctgcaactttatccgcctccattcagtctattaattgttgccgggaagctagagtaagtagttcgccagttaatagtttgcgcaacgttgttggcattgctacaggcatcgtggtgtcactctcgtcgtttggtatggcttcattcagctccggttcccaacgatcaaggcgagttacatgatcccccatgttgtgcaaaaaagcggttagctccttcggtcctccgatcgttgtcagaagtaagttggccgcagtgttatcactcatggttatggcagcactgcataattctcttactgtcatgccatccgtaagatgcttttctgtgactggtgagtactcaaccaagtcattctgagaatagtgtatgcggcgaccgagttgctcttgcccggcgtcaatacgggataatagtgtatcacatagcagaactttaaaagtgctcatcattggaaaacgttcttcggggcgaaaactctcaaggatcttaccgctgttgagatccagttcgatgtaacccactcgtgcacccaactgatcttcagcatcttttactttcaccagcgtttctgggtgagcaaaaacaggaaggcaaaatgccgcaaaaaagggaataagggcgacacggaaatgttgaatactcatactcttcctttttcaatgggtaataactgatataattaaattgaagctctaatttgtgagtttagtatacatgcatttacttataatacagttttttagttttgctggccgcatcttctcaaatatgcttcccagcctgcttttctgtaacgttcaccctctaccttagcatcccttccctttgcaaatagtcctcttccaacaataataatgtcagatcctgtagagaccacatcatccacggttctatactgttgacccaatgcgtctcccttgtcatctaaacccacaccgggtgtcataatcaaccaatcgtaaccttcatctcttccacccatgtctctttgagcaataaagccgataacaaaatctttgtcgctcttcgcaatgtcaacagtacccttagtatattctccagtagatagggagcccttgcatgacaattctgctaacatcaaaaggcctctaggttcctttgttacttcttctgccgcctgcttcaaaccgctaacaatacctgggcccaccacaccgtgtgcattcgtaatgtctgcccattctgctattctgtatacacccgcagagtactgcaatttgactgtattaccaatgtcagcaaattttctgtcttcg

SEQ ID NO: 5 - DNA, 7266 bp, Artificial Sequence
  OXC154-R3G(=GGG)/L21G/S60T/S88A(=GCT)
aagagtaaaaaattgtacttggcggataatgcctttagcggcttaactgtgccctccatggaaaaatcagtcaagatatccacatgtgtttttagtaaacaaattttgggacctaatgcttcaactaactccagtaattccttggtggtacgaacatccaatgaagcacacaagtttgtttgcttttcgtgcatgatattaaatagcttggcagcaacaggactaggatgagtagcagcacgttccttatatgtagctttcgacatgatttatcttcgtttcctgcaggtttttgttctgtgcagttgggttaagaatactgggcaatttcatgtttcttcaacactacatatgcgtatatataccaatctaagtctgtgctccttccttcgttcttccttctgttcggagattaccgaatcaaaaaaatttcaaagaaaccgaaatcaaaaaaaagaataaaaaaaaaatgatgaattgaattgaaaagctagcttatcgatgataagctgtcaaagatgagaattaattccacggactatagactatactagatactccgtctactgtacgatacacttccgctcaggtccttgtcctttaacgaggccttaccactcttttgttactctattgatccagctcagcaaaggcagtgtgatctaagattctatcttcgcgatgtagtaaaactagctagaccgagaaagagactagaaatgcaaaaggcacttctacaatggctgccatcattattatccgatgtgacgctgcagcttctcaatgatattcgaatacgctttgaggagatacagcctaatatccgacaaactgttttacagatttacgatcgtacttgttacccatcattgaattttgaacatccgaacctgggagttttccctgaaacagatagtatatttgaacctgtataataatatatagtctagcgctttacggaagacaatgtatgtatttcggttcctggagaaactattgcatctattgcataggtaatcttgcacgtcgcatccccggttcattttctgcgtttccatcttgcacttcaatagcatatctttgttcgcttgcctgtaacttacacgcgcctcgtatcttttaatgatggaataatttgggaatttactctgtgtttatttatttttatgttttgtatttggattttagaaagtaaataaagaaggtagaagagttacggaatgaagaaaaaaaaataaacaaaggtttaaaaaatttcaacaaaaagcgtactttacatatatatttattagacaagaaaagcagattaaatagatatacattcgattaacgataagtaaaatgtaaaatcacaggattttcgtgtgtggtcttctacacagacaagatgaaacaattcggcattaatacctgagagcaggaagagcaagataaaaggtagtatttgttggcgatccccctagagtcttttacatcttcggaaaacaaaaactattttttctttaatttctttttttactttctatttttaatttatatatttatattaaaaaatttaaattataattatttttatagcacgtgatgaaaaggaccgggaagctccaccccggttgataatcagaaaagccccaaaaacaggaagattgtataagcaaatatttaaattgtaaacgttaatattttgttaaaattcgcgttaaatttttgttaaatcagctcattttttaacgaatagcccgaaatcggcaaaatcccttataaatcaaaagaatagaccgagatagggttgagtgttgttccagtttccaacaagagtccactattaaagaacgtggactccaacgtcaaagggcgaaaaagggtctatcagggcgatggcccactacgtgaaccatcaccctaatcaagttttttggggtcgaggtgccgtaaagcagtaaatcggaagggtaaacggatgcccccatttagagcttgacggggaaagccggcgaacgtggcgagaaaggaagggaagaaagcgaaaggagcgggggctagggcggtgggaagtgtaggggtcacgctgggcgtaaccaccacacccgccgcgcttaatggggcgctacagggcgcgtggggatgatccactagtacggattagaagccgccgagcgggtgacagccctccgaaggaagactctcctccgtgcgtcctcgtcttcaccggtcgcgttcctgaaacgcagatgtgcctcgcgccgcactgctccgaacaataaagattctacaatactagcttttatggttatgaagaggaaaaattggcagtaacctggccccacaaaccttcaaatgaacgaatcaaattaacaaccataggatgataatgcgattagttttttagccttatttctggggtaattaatcagcgaagcgatgatttttgatctattaacagatatataaatgcaaaaactgcataaccactttaactaatactttcaacattttcggtttgtattacttcttattcaaatgtaataaaagtatcaacaaaaaattgttaatatacctctatactttaacgtcaaggagaaaaaaccccggatcggactactagcagctgtaatacgactcactatagggaatattaagcttaaacaatgaggcaggtttggttctcttggattgtgggattgttcctatgttttttcaacgtgtcttctgctgctccagtcaacactacaacagaagatgaaacggcacaaattccggctgaagctgtcatcggttactcagatttagaaggggatttcgatgttgctgttttgccattttccaacagcacaaataacgggttattgtttataaatactactattgccagcattgctgctaaagaagaaggggtatctctcgagaaaagagaggctgaagctatgccaggggaaaacttcttgaagtgcttctcccaatatatcccaaacaacgctactaacgggaagttagtttacactcaaaacaatccattatacatgtctgtcttaaactctactattcataacttaagatttacttccgatactacccctaagccattggttatcgtcaccccaacgcacgtctcccatatccaaggtactatcttatgttctaagaaggttggtttgcaaatccgtactagatctggtggtcacgacgctgaaggtatgtcctatatctctcaagtcccatttgtcattgttgacttaagaaatatgagatccattaaaattgatgttcattctcaaactgcttgggtcgaagctggtgccaccttgggtgaagtttactactgggtcaacgaaaaaaacgaaaacttatctttagctgccggttactgtccaaccgtctgtgctggtggtcatttcggtggtggtggttacggtccattgatgcgtaactacggtttagctgctgacaacattattgacgctcatttagttaatgttcacggtaaggttttggacagaaaatctatgggtgaagatttattttgggccttgagaggtggtggtgctgaatccttcggtatcatcgttgcctggaagattcgtttagttgctgtcccttctaagtccaccatgttctccgtcaagaaaatcatggaaattcatgagttggtcaaattggttaacaagtggcaaaacatcgcttacaagtatgacaaggatttgttgttaatgactcacttcatcacccgtaatatcaccgacaaccaaggtaagaacaaaactgctattcacacctacttctcctccgtttttttgggtggtgtcgactccttagtcgatttgatgaacaaatcctttccagaattgggtattaagaaaactgattgtagacaattgtcttggattgacaccattatcttctattctggtgtcgttaactacgacaccgacaactttaacaaggaaattttgttggatcgttctgctggtcaaaatggtgccttcaaaatcaaattggactacgtcaaaaagccaatcccagaatctgttttcgttcaaattttggaaaagttgtacgaagaagacattggtgccggtatgtatgctttgtatccatatggtggtatcatggacgaaatttccgaatctgccatcccattcccacacagagctggtattttatatgaattgtggtacatctgttcttgggaaaagcaagaagacaacgaaaagcatttaaactggattagaaacatttacaacttcatgaccccatacgtttctaagaacccaagattagcctatttgaactaccgtgacttagatattggtattaatgacccaaagaacccaaacaactatactcaagccagaatttggggtgaaaagtacttcggtaagaacttcgatagattagttaaggttaaaactttggtcgatccaaacaacttcttcagaaacgaacaatccatcccaccattgccaagacatcgtcacggccatcatcaccatcaccattagctcgagcatgcatctagagggccgcatcatgtaattagttatgtcacgcttacattcacgccctccccccacatccgctctaaccgaaaaggaaggagttagacaacctgaagtctaggtccctatttatttttttatagttatgttagtattaagaacgttatttatatttcaaatttttcttttttttctgtacagacgcgtgtacgcatgtaacattatactgaaaaccttgcttgagaaggttttgggacgctcgaaggctttaatttgcggccctgcattaatgaatcggccaacgcgcggggagaggcggtttgcgtattgggcgctcttccgcttcctcgctcactgactcgctgcgctcggtcgttcggctgcggcgagcggtatcagctcactcaaaggcggtaatacggttatccacagaatcaggggataacgcaggaaagaacatgtgagcaaaaggccagcaaaagcccaggaaccgtaaaaaggccgcgttgctggcgtttttccataggctccgcccccctgacgagcatcacaaaaatcgacgctcaagtcagaggtggcgaaacccgacaggactataaagataccaggcgtttccccctggaagctccctcgtgcgctctcctgttccgaccctgccgcttaccggatacctgtccgcctttctcccttcgggaagcgtggcgctttctcatagctcacgctgtaggtatctcagttcggtgtaggtcgttcgctccaagctgggctgtgtgcacgaaccccccgttcagcccgaccgctgcgccttatccggtaactatcgtcttgagtccaacccggtaagacacgacttatcgccactggcagcagccactggtaacaggattagcagagcgaggtatgtaggcggtgctacagagttcttgaagtggtggcctaactacggctacactagaagaacagtatttggtatctgcgctctgctgaagccagttaccttcggaaaaagagttggtagctcttgatccggcaaacaaaccaccgctggtagcggtggtttttttgtttgcaagcagcagattacgcgcagaaaaaaaggatctcaagaagatcctttgatcttttctacggggtctgacgctcagtggaacgaaaactcacgttaagggattttggtcatgagattatcaaaaaggatcttcacctagatccttttaaattaaaaatgaagttttaaatcaatctaaagtatatatgagtaaacttggtctgacagttaccaatgcttaatcagtgaggcacctatctcagcgatctgtctatttcgttcatccatagttgcctgactccccgtcgtgtagataactacgatacgggagcgcttaccatctggccccagtgctgcaatgataccgcgagacccacgctcaccggctccagatttatcagcaataaaccagccagccggaagggccgagcgcagaagtggtcctgcaactttatccgcctccattcagtctattaattgttgccgggaagctagagtaagtagttcgccagttaatagtttgcgcaacgttgttggcattgctacaggcatcgtggtgtcactctcgtcgtttggtatggcttcattcagctccggttcccaacgatcaaggcgagttacatgatcccccatgttgtgcaaaaaagcggttagctccttcggtcctccgatcgttgtcagaagtaagttggccgcagtgttatcactcatggttatggcagcactgcataattctcttactgtcatgccatccgtaagatgcttttctgtgactggtgagtactcaaccaagtcattctgagaatagtgtatgcggcgaccgagttgctcttgcccggcgtcaatacgggataatagtgtatcacatagcagaactttaaaagtgctcatcattggaaaacgttcttcggggcgaaaactctcaaggatcttaccgctgttgagatccagttcgatgtaacccactcgtgcacccaactgatcttcagcatcttttactttcaccagcgtttctgggtgagcaaaaacaggaaggcaaaatgccgcaaaaaagggaataagggcgacacggaaatgttgaatactcatactcttcctttttcaatgggtaataactgatataattaaattgaagctctaatttgtgagtttagtatacatgcatttacttataatacagttttttagttttgctggccgcatcttctcaaatatgcttcccagcctgcttttctgtaacgttcaccctctaccttagcatcccttccctttgcaaatagtcctcttccaacaataataatgtcagatcctgtagagaccacatcatccacggttctatactgttgacccaatgcgtctcccttgtcatctaaacccacaccgggtgtcataatcaaccaatcgtaaccttcatctcttccacccatgtctctttgagcaataaagccgataacaaaatctttgtcgctcttcgcaatgtcaacagtacccttagtatattctccagtagatagggagcccttgcatgacaattctgctaacatcaaaaggcctctaggttcctttgttacttcttctgccgcctgcttcaaaccgctaacaatacctgggcccaccacaccgtgtgcattcgtaatgtctgcccattctgctattctgtatacacccgcagagtactgcaatttgactgtattaccaatgtcagcaaattttctgtcttcg

SEQ ID NO: 6 - DNA, 7266 bp, Artificial Sequence
  OXC154-R3G(=GGG)/A18E/T49R/S60T/S88A(=GCT)
aagagtaaaaaattgtacttggcggataatgcctttagcggcttaactgtgccctccatggaaaaatcagtcaagatatccacatgtgtttttagtaaacaaattttgggacctaatgcttcaactaactccagtaattccttggtggtacgaacatccaatgaagcacacaagtttgtttgcttttcgtgcatgatattaaatagcttggcagcaacaggactaggatgagtagcagcacgttccttatatgtagctttcgacatgatttatcttcgtttcctgcaggtttttgttctgtgcagttgggttaagaatactgggcaatttcatgtttcttcaacactacatatgcgtatatataccaatctaagtctgtgctccttccttcgttcttccttctgttcggagattaccgaatcaaaaaaatttcaaagaaaccgaaatcaaaaaaaagaataaaaaaaaaatgatgaattgaattgaaaagctagcttatcgatgataagctgtcaaagatgagaattaattccacggactatagactatactagatactccgtctactgtacgatacacttccgctcaggtccttgtcctttaacgaggccttaccactcttttgttactctattgatccagctcagcaaaggcagtgtgatctaagattctatcttcgcgatgtagtaaaactagctagaccgagaaagagactagaaatgcaaaaggcacttctacaatggctgccatcattattatccgatgtgacgctgcagcttctcaatgatattcgaatacgctttgaggagatacagcctaatatccgacaaactgttttacagatttacgatcgtacttgttacccatcattgaattttgaacatccgaacctgggagttttccctgaaacagatagtatatttgaacctgtataataatatatagtctagcgctttacggaagacaatgtatgtatttcggttcctggagaaactattgcatctattgcataggtaatcttgcacgtcgcatccccggttcattttctgcgtttccatcttgcacttcaatagcatatctttgttcgcttgcctgtaacttacacgcgcctcgtatcttttaatgatggaataatttgggaatttactctgtgtttatttatttttatgttttgtatttggattttagaaagtaaataaagaaggtagaagagttacggaatgaagaaaaaaaaataaacaaaggtttaaaaaatttcaacaaaaagcgtactttacatatatatttattagacaagaaaagcagattaaatagatatacattcgattaacgataagtaaaatgtaaaatcacaggattttcgtgtgtggtcttctacacagacaagatgaaacaattcggcattaatacctgagagcaggaagagcaagataaaaggtagtatttgttggcgatccccctagagtcttttacatcttcggaaaacaaaaactattttttctttaatttctttttttactttctatttttaatttatatatttatattaaaaaatttaaattataattatttttatagcacgtgatgaaaaggaccgggaagctccaccccggttgataatcagaaaagccccaaaaacaggaagattgtataagcaaatatttaaattgtaaacgttaatattttgttaaaattcgcgttaaatttttgttaaatcagctcattttttaacgaatagcccgaaatcggcaaaatcccttataaatcaaaagaatagaccgagatagggttgagtgttgttccagtttccaacaagagtccactattaaagaacgtggactccaacgtcaaagggcgaaaaagggtctatcagggcgatggcccactacgtgaaccatcaccctaatcaagttttttggggtcgaggtgccgtaaagcagtaaatcggaagggtaaacggatgcccccatttagagcttgacggggaaagccggcgaacgtggcgagaaaggaagggaagaaagcgaaaggagcgggggctagggcggtgggaagtgtaggggtcacgctgggcgtaaccaccacacccgccgcgcttaatggggcgctacagggcgcgtggggatgatccactagtacggattagaagccgccgagcgggtgacagccctccgaaggaagactctcctccgtgcgtcctcgtcttcaccggtcgcgttcctgaaacgcagatgtgcctcgcgccgcactgctccgaacaataaagattctacaatactagcttttatggttatgaagaggaaaaattggcagtaacctggccccacaaaccttcaaatgaacgaatcaaattaacaaccataggatgataatgcgattagttttttagccttatttctggggtaattaatcagcgaagcgatgatttttgatctattaacagatatataaatgcaaaaactgcataaccactttaactaatactttcaacattttcggtttgtattacttcttattcaaatgtaataaaagtatcaacaaaaaattgttaatatacctctatactttaacgtcaaggagaaaaaaccccggatcggactactagcagctgtaatacgactcactatagggaatattaagcttaaacaatgaggcaggtttggttctcttggattgtgggattgttcctatgttttttcaacgtgtcttctgctgctccagtcaacactacaacagaagatgaaacggcacaaattccggctgaagctgtcatcggttactcagatttagaaggggatttcgatgttgctgttttgccattttccaacagcacaaataacgggttattgtttataaatactactattgccagcattgctgctaaagaagaaggggtatctctcgagaaaagagaggctgaagctatgccaggggaaaacttcttgaagtgcttctcccaatatatcccaaacaacgagactaacttaaagttagtttacactcaaaacaatccattatacatgtctgtcttaaactctactattcataacttaagatttacttccgatcggacccctaagccattggttatcgtcaccccaacgcacgtctcccatatccaaggtactatcttatgttctaagaaggttggtttgcaaatccgtactagatctggtggtcacgacgctgaaggtatgtcctatatctctcaagtcccatttgtcattgttgacttaagaaatatgagatccattaaaattgatgttcattctcaaactgcttgggtcgaagctggtgccaccttgggtgaagtttactactgggtcaacgaaaaaaacgaaaacttatctttagctgccggttactgtccaaccgtctgtgctggtggtcatttcggtggtggtggttacggtccattgatgcgtaactacggtttagctgctgacaacattattgacgctcatttagttaatgttcacggtaaggttttggacagaaaatctatgggtgaagatttattttgggccttgagaggtggtggtgctgaatccttcggtatcatcgttgcctggaagattcgtttagttgctgtcccttctaagtccaccatgttctccgtcaagaaaatcatggaaattcatgagttggtcaaattggttaacaagtggcaaaacatcgcttacaagtatgacaaggatttgttgttaatgactcacttcatcacccgtaatatcaccgacaaccaaggtaagaacaaaactgctattcacacctacttctcctccgtttttttgggtggtgtcgactccttagtcgatttgatgaacaaatcctttccagaattgggtattaagaaaactgattgtagacaattgtcttggattgacaccattatcttctattctggtgtcgttaactacgacaccgacaactttaacaaggaaattttgttggatcgttctgctggtcaaaatggtgccttcaaaatcaaattggactacgtcaaaaagccaatcccagaatctgttttcgttcaaattttggaaaagttgtacgaagaagacattggtgccggtatgtatgctttgtatccatatggtggtatcatggacgaaatttccgaatctgccatcccattcccacacagagctggtattttatatgaattgtggtacatctgttcttgggaaaagcaagaagacaacgaaaagcatttaaactggattagaaacatttacaacttcatgaccccatacgtttctaagaacccaagattagcctatttgaactaccgtgacttagatattggtattaatgacccaaagaacccaaacaactatactcaagccagaatttggggtgaaaagtacttcggtaagaacttcgatagattagttaaggttaaaactttggtcgatccaaacaacttcttcagaaacgaacaatccatcccaccattgccaagacatcgtcacggccatcatcaccatcaccattagctcgagcatgcatctagagggccgcatcatgtaattagttatgtcacgcttacattcacgccctccccccacatccgctctaaccgaaaaggaaggagttagacaacctgaagtctaggtccctatttatttttttatagttatgttagtattaagaacgttatttatatttcaaatttttcttttttttctgtacagacgcgtgtacgcatgtaacattatactgaaaaccttgcttgagaaggttttgggacgctcgaaggctttaatttgcggccctgcattaatgaatcggccaacgcgcggggagaggcggtttgcgtattgggcgctcttccgcttcctcgctcactgactcgctgcgctcggtcgttcggctgcggcgagcggtatcagctcactcaaaggcggtaatacggttatccacagaatcaggggataacgcaggaaagaacatgtgagcaaaaggccagcaaaagcccaggaaccgtaaaaaggccgcgttgctggcgtttttccataggctccgcccccctgacgagcatcacaaaaatcgacgctcaagtcagaggtggcgaaacccgacaggactataaagataccaggcgtttccccctggaagctccctcgtgcgctctcctgttccgaccctgccgcttaccggatacctgtccgcctttctcccttcgggaagcgtggcgctttctcatagctcacgctgtaggtatctcagttcggtgtaggtcgttcgctccaagctgggctgtgtgcacgaaccccccgttcagcccgaccgctgcgccttatccggtaactatcgtcttgagtccaacccggtaagacacgacttatcgccactggcagcagccactggtaacaggattagcagagcgaggtatgtaggcggtgctacagagttcttgaagtggtggcctaactacggctacactagaagaacagtatttggtatctgcgctctgctgaagccagttaccttcggaaaaagagttggtagctcttgatccggcaaacaaaccaccgctggtagcggtggtttttttgtttgcaagcagcagattacgcgcagaaaaaaaggatctcaagaagatcctttgatcttttctacggggtctgacgctcagtggaacgaaaactcacgttaagggattttggtcatgagattatcaaaaaggatcttcacctagatccttttaaattaaaaatgaagttttaaatcaatctaaagtatatatgagtaaacttggtctgacagttaccaatgcttaatcagtgaggcacctatctcagcgatctgtctatttcgttcatccatagttgcctgactccccgtcgtgtagataactacgatacgggagcgcttaccatctggccccagtgctgcaatgataccgcgagacccacgctcaccggctccagatttatcagcaataaaccagccagccggaagggccgagcgcagaagtggtcctgcaactttatccgcctccattcagtctattaattgttgccgggaagctagagtaagtagttcgccagttaatagtttgcgcaacgttgttggcattgctacaggcatcgtggtgtcactctcgtcgtttggtatggcttcattcagctccggttcccaacgatcaaggcgagttacatgatcccccatgttgtgcaaaaaagcggttagctccttcggtcctccgatcgttgtcagaagtaagttggccgcagtgttatcactcatggttatggcagcactgcataattctcttactgtcatgccatccgtaagatgcttttctgtgactggtgagtactcaaccaagtcattctgagaatagtgtatgcggcgaccgagttgctcttgcccggcgtcaatacgggataatagtgtatcacatagcagaactttaaaagtgctcatcattggaaaacgttcttcggggcgaaaactctcaaggatcttaccgctgttgagatccagttcgatgtaacccactcgtgcacccaactgatcttcagcatcttttactttcaccagcgtttctgggtgagcaaaaacaggaaggcaaaatgccgcaaaaaagggaataagggcgacacggaaatgttgaatactcatactcttcctttttcaatgggtaataactgatataattaaattgaagctctaatttgtgagtttagtatacatgcatttacttataatacagttttttagttttgctggccgcatcttctcaaatatgcttcccagcctgcttttctgtaacgttcaccctctaccttagcatcccttccctttgcaaatagtcctcttccaacaataataatgtcagatcctgtagagaccacatcatccacggttctatactgttgacccaatgcgtctcccttgtcatctaaacccacaccgggtgtcataatcaaccaatcgtaaccttcatctcttccacccatgtctctttgagcaataaagccgataacaaaatctttgtcgctcttcgcaatgtcaacagtacccttagtatattctccagtagatagggagcccttgcatgacaattctgctaacatcaaaaggcctctaggttcctttgttacttcttctgccgcctgcttcaaaccgctaacaatacctgggcccaccacaccgtgtgcattcgtaatgtctgcccattctgctattctgtatacacccgcagagtactgcaatttgactgtattaccaatgtcagcaaattttctgtcttcg

SEQ ID NO: 7 - DNA, 7266 bp, Artificial Sequence
  OXC154-R3T/T49R/S88A(=GCC)
aagagtaaaaaattgtacttggcggataatgcctttagcggcttaactgtgccctccatggaaaaatcagtcaagatatccacatgtgtttttagtaaacaaattttgggacctaatgcttcaactaactccagtaattccttggtggtacgaacatccaatgaagcacacaagtttgtttgcttttcgtgcatgatattaaatagcttggcagcaacaggactaggatgagtagcagcacgttccttatatgtagctttcgacatgatttatcttcgtttcctgcaggtttttgttctgtgcagttgggttaagaatactgggcaatttcatgtttcttcaacactacatatgcgtatatataccaatctaagtctgtgctccttccttcgttcttccttctgttcggagattaccgaatcaaaaaaatttcaaagaaaccgaaatcaaaaaaaagaataaaaaaaaaatgatgaattgaattgaaaagctagcttatcgatgataagctgtcaaagatgagaattaattccacggactatagactatactagatactccgtctactgtacgatacacttccgctcaggtccttgtcctttaacgaggccttaccactcttttgttactctattgatccagctcagcaaaggcagtgtgatctaagattctatcttcgcgatgtagtaaaactagctagaccgagaaagagactagaaatgcaaaaggcacttctacaatggctgccatcattattatccgatgtgacgctgcagcttctcaatgatattcgaatacgctttgaggagatacagcctaatatccgacaaactgttttacagatttacgatcgtacttgttacccatcattgaattttgaacatccgaacctgggagttttccctgaaacagatagtatatttgaacctgtataataatatatagtctagcgctttacggaagacaatgtatgtatttcggttcctggagaaactattgcatctattgcataggtaatcttgcacgtcgcatccccggttcattttctgcgtttccatcttgcacttcaatagcatatctttgttcgcttgcctgtaacttacacgcgcctcgtatcttttaatgatggaataatttgggaatttactctgtgtttatttatttttatgttttgtatttggattttagaaagtaaataaagaaggtagaagagttacggaatgaagaaaaaaaaataaacaaaggtttaaaaaatttcaacaaaaagcgtactttacatatatatttattagacaagaaaagcagattaaatagatatacattcgattaacgataagtaaaatgtaaaatcacaggattttcgtgtgtggtcttctacacagacaagatgaaacaattcggcattaatacctgagagcaggaagagcaagataaaaggtagtatttgttggcgatccccctagagtcttttacatcttcggaaaacaaaaactattttttctttaatttctttttttactttctatttttaatttatatatttatattaaaaaatttaaattataattatttttatagcacgtgatgaaaaggaccgggaagctccaccccggttgataatcagaaaagccccaaaaacaggaagattgtataagcaaatatttaaattgtaaacgttaatattttgttaaaattcgcgttaaatttttgttaaatcagctcattttttaacgaatagcccgaaatcggcaaaatcccttataaatcaaaagaatagaccgagatagggttgagtgttgttccagtttccaacaagagtccactattaaagaacgtggactccaacgtcaaagggcgaaaaagggtctatcagggcgatggcccactacgtgaaccatcaccctaatcaagttttttggggtcgaggtgccgtaaagcagtaaatcggaagggtaaacggatgcccccatttagagcttgacggggaaagccggcgaacgtggcgagaaaggaagggaagaaagcgaaaggagcgggggctagggcggtgggaagtgtaggggtcacgctgggcgtaaccaccacacccgccgcgcttaatggggcgctacagggcgcgtggggatgatccactagtacggattagaagccgccgagcgggtgacagccctccgaaggaagactctcctccgtgcgtcctcgtcttcaccggtcgcgttcctgaaacgcagatgtgcctcgcgccgcactgctccgaacaataaagattctacaatactagcttttatggttatgaagaggaaaaattggcagtaacctggccccacaaaccttcaaatgaacgaatcaaattaacaaccataggatgataatgcgattagttttttagccttatttctggggtaattaatcagcgaagcgatgatttttgatctattaacagatatataaatgcaaaaactgcataaccactttaactaatactttcaacattttcggtttgtattacttcttattcaaatgtaataaaagtatcaacaaaaaattgttaatatacctctatactttaacgtcaaggagaaaaaaccccggatcggactactagcagctgtaatacgactcactatagggaatattaagcttaaacaatgaggcaggtttggttctcttggattgtgggattgttcctatgttttttcaacgtgtcttctgctgctccagtcaacactacaacagaagatgaaacggcacaaattccggctgaagctgtcatcggttactcagatttagaaggggatttcgatgttgctgttttgccattttccaacagcacaaataacgggttattgtttataaatactactattgccagcattgctgctaaagaagaaggggtatctctcgagaaaagagaggctgaagctatgccaacggaaaacttcttgaagtgcttctcccaatatatcccaaacaacgctactaacttaaagttagtttacactcaaaacaatccattatacatgtctgtcttaaactctactattcataacttaagatttacttccgatcggacccctaagccattggttatcgtcaccccatctcacgtctcccatatccaaggtactatcttatgttctaagaaggttggtttgcaaatccgtactagatctggtggtcacgacgccgaaggtatgtcctatatctctcaagtcccatttgtcattgttgacttaagaaatatgagatccattaaaattgatgttcattctcaaactgcttgggtcgaagctggtgccaccttgggtgaagtttactactgggtcaacgaaaaaaacgaaaacttatctttagctgccggttactgtccaaccgtctgtgctggtggtcatttcggtggtggtggttacggtccattgatgcgtaactacggtttagctgctgacaacattattgacgctcatttagttaatgttcacggtaaggttttggacagaaaatctatgggtgaagatttattttgggccttgagaggtggtggtgctgaatccttcggtatcatcgttgcctggaagattcgtttagttgctgtcccttctaagtccaccatgttctccgtcaagaaaatcatggaaattcatgagttggtcaaattggttaacaagtggcaaaacatcgcttacaagtatgacaaggatttgttgttaatgactcacttcatcacccgtaatatcaccgacaaccaaggtaagaacaaaactgctattcacacctacttctcctccgtttttttgggtggtgtcgactccttagtcgatttgatgaacaaatcctttccagaattgggtattaagaaaactgattgtagacaattgtcttggattgacaccattatcttctattctggtgtcgttaactacgacaccgacaactttaacaaggaaattttgttggatcgttctgctggtcaaaatggtgccttcaaaatcaaattggactacgtcaaaaagccaatcccagaatctgttttcgttcaaattttggaaaagttgtacgaagaagacattggtgccggtatgtatgctttgtatccatatggtggtatcatggacgaaatttccgaatctgccatcccattcccacacagagctggtattttatatgaattgtggtacatctgttcttgggaaaagcaagaagacaacgaaaagcatttaaactggattagaaacatttacaacttcatgaccccatacgtttctaagaacccaagattagcctatttgaactaccgtgacttagatattggtattaatgacccaaagaacccaaacaactatactcaagccagaatttggggtgaaaagtacttcggtaagaacttcgatagattagttaaggttaaaactttggtcgatccaaacaacttcttcagaaacgaacaatccatcccaccattgccaagacatcgtcacggccatcatcaccatcaccattagctcgagcatgcatctagagggccgcatcatgtaattagttatgtcacgcttacattcacgccctccccccacatccgctctaaccgaaaaggaaggagttagacaacctgaagtctaggtccctatttatttttttatagttatgttagtattaagaacgttatttatatttcaaatttttcttttttttctgtacagacgcgtgtacgcatgtaacattatactgaaaaccttgcttgagaaggttttgggacgctcgaaggctttaatttgcggccctgcattaatgaatcggccaacgcgcggggagaggcggtttgcgtattgggcgctcttccgcttcctcgctcactgactcgctgcgctcggtcgttcggctgcggcgagcggtatcagctcactcaaaggcggtaatacggttatccacagaatcaggggataacgcaggaaagaacatgtgagcaaaaggccagcaaaagcccaggaaccgtaaaaaggccgcgttgctggcgtttttccataggctccgcccccctgacgagcatcacaaaaatcgacgctcaagtcagaggtggcgaaacccgacaggactataaagataccaggcgtttccccctggaagctccctcgtgcgctctcctgttccgaccctgccgcttaccggatacctgtccgcctttctcccttcgggaagcgtggcgctttctcatagctcacgctgtaggtatctcagttcggtgtaggtcgttcgctccaagctgggctgtgtgcacgaaccccccgttcagcccgaccgctgcgccttatccggtaactatcgtcttgagtccaacccggtaagacacgacttatcgccactggcagcagccactggtaacaggattagcagagcgaggtatgtaggcggtgctacagagttcttgaagtggtggcctaactacggctacactagaagaacagtatttggtatctgcgctctgctgaagccagttaccttcggaaaaagagttggtagctcttgatccggcaaacaaaccaccgctggtagcggtggtttttttgtttgcaagcagcagattacgcgcagaaaaaaaggatctcaagaagatcctttgatcttttctacggggtctgacgctcagtggaacgaaaactcacgttaagggattttggtcatgagattatcaaaaaggatcttcacctagatccttttaaattaaaaatgaagttttaaatcaatctaaagtatatatgagtaaacttggtctgacagttaccaatgcttaatcagtgaggcacctatctcagcgatctgtctatttcgttcatccatagttgcctgactccccgtcgtgtagataactacgatacgggagcgcttaccatctggccccagtgctgcaatgataccgcgagacccacgctcaccggctccagatttatcagcaataaaccagccagccggaagggccgagcgcagaagtggtcctgcaactttatccgcctccattcagtctattaattgttgccgggaagctagagtaagtagttcgccagttaatagtttgcgcaacgttgttggcattgctacaggcatcgtggtgtcactctcgtcgtttggtatggcttcattcagctccggttcccaacgatcaaggcgagttacatgatcccccatgttgtgcaaaaaagcggttagctccttcggtcctccgatcgttgtcagaagtaagttggccgcagtgttatcactcatggttatggcagcactgcataattctcttactgtcatgccatccgtaagatgcttttctgtgactggtgagtactcaaccaagtcattctgagaatagtgtatgcggcgaccgagttgctcttgcccggcgtcaatacgggataatagtgtatcacatagcagaactttaaaagtgctcatcattggaaaacgttcttcggggcgaaaactctcaaggatcttaccgctgttgagatccagttcgatgtaacccactcgtgcacccaactgatcttcagcatcttttactttcaccagcgtttctgggtgagcaaaaacaggaaggcaaaatgccgcaaaaaagggaataagggcgacacggaaatgttgaatactcatactcttcctttttcaatgggtaataactgatataattaaattgaagctctaatttgtgagtttagtatacatgcatttacttataatacagttttttagttttgctggccgcatcttctcaaatatgcttcccagcctgcttttctgtaacgttcaccctctaccttagcatcccttccctttgcaaatagtcctcttccaacaataataatgtcagatcctgtagagaccacatcatccacggttctatactgttgacccaatgcgtctcccttgtcatctaaacccacaccgggtgtcataatcaaccaatcgtaaccttcatctcttccacccatgtctctttgagcaataaagccgataacaaaatctttgtcgctcttcgcaatgtcaacagtacccttagtatattctccagtagatagggagcccttgcatgacaattctgctaacatcaaaaggcctctaggttcctttgttacttcttctgccgcctgcttcaaaccgctaacaatacctgggcccaccacaccgtgtgcattcgtaatgtctgcccattctgctattctgtatacacccgcagagtactgcaatttgactgtattaccaatgtcagcaaattttctgtcttcg

SEQ ID NO: 8 - DNA, 7266 bp, Artificial Sequence
  OXC154-R3W/A18E/T49R/S60T/S88A(=GCT)
aagagtaaaaaattgtacttggcggataatgcctttagcggcttaactgtgccctccatggaaaaatcagtcaagatatccacatgtgtttttagtaaacaaattttgggacctaatgcttcaactaactccagtaattccttggtggtacgaacatccaatgaagcacacaagtttgtttgcttttcgtgcatgatattaaatagcttggcagcaacaggactaggatgagtagcagcacgttccttatatgtagctttcgacatgatttatcttcgtttcctgcaggtttttgttctgtgcagttgggttaagaatactgggcaatttcatgtttcttcaacactacatatgcgtatatataccaatctaagtctgtgctccttccttcgttcttccttctgttcggagattaccgaatcaaaaaaatttcaaagaaaccgaaatcaaaaaaaagaataaaaaaaaaatgatgaattgaattgaaaagctagcttatcgatgataagctgtcaaagatgagaattaattccacggactatagactatactagatactccgtctactgtacgatacacttccgctcaggtccttgtcctttaacgaggccttaccactcttttgttactctattgatccagctcagcaaaggcagtgtgatctaagattctatcttcgcgatgtagtaaaactagctagaccgagaaagagactagaaatgcaaaaggcacttctacaatggctgccatcattattatccgatgtgacgctgcagcttctcaatgatattcgaatacgctttgaggagatacagcctaatatccgacaaactgttttacagatttacgatcgtacttgttacccatcattgaattttgaacatccgaacctgggagttttccctgaaacagatagtatatttgaacctgtataataatatatagtctagcgctttacggaagacaatgtatgtatttcggttcctggagaaactattgcatctattgcataggtaatcttgcacgtcgcatccccggttcattttctgcgtttccatcttgcacttcaatagcatatctttgttcgcttgcctgtaacttacacgcgcctcgtatcttttaatgatggaataatttgggaatttactctgtgtttatttatttttatgttttgtatttggattttagaaagtaaataaagaaggtagaagagttacggaatgaagaaaaaaaaataaacaaaggtttaaaaaatttcaacaaaaagcgtactttacatatatatttattagacaagaaaagcagattaaatagatatacattcgattaacgataagtaaaatgtaaaatcacaggattttcgtgtgtggtcttctacacagacaagatgaaacaattcggcattaatacctgagagcaggaagagcaagataaaaggtagtatttgttggcgatccccctagagtcttttacatcttcggaaaacaaaaactattttttctttaatttctttttttactttctatttttaatttatatatttatattaaaaaatttaaattataattatttttatagcacgtgatgaaaaggaccgggaagctccaccccggttgataatcagaaaagccccaaaaacaggaagattgtataagcaaatatttaaattgtaaacgttaatattttgttaaaattcgcgttaaatttttgttaaatcagctcattttttaacgaatagcccgaaatcggcaaaatcccttataaatcaaaagaatagaccgagatagggttgagtgttgttccagtttccaacaagagtccactattaaagaacgtggactccaacgtcaaagggcgaaaaagggtctatcagggcgatggcccactacgtgaaccatcaccctaatcaagttttttggggtcgaggtgccgtaaagcagtaaatcggaagggtaaacggatgcccccatttagagcttgacggggaaagccggcgaacgtggcgagaaaggaagggaagaaagcgaaaggagcgggggctagggcggtgggaagtgtaggggtcacgctgggcgtaaccaccacacccgccgcgcttaatggggcgctacagggcgcgtggggatgatccactagtacggattagaagccgccgagcgggtgacagccctccgaaggaagactctcctccgtgcgtcctcgtcttcaccggtcgcgttcctgaaacgcagatgtgcctcgcgccgcactgctccgaacaataaagattctacaatactagcttttatggttatgaagaggaaaaattggcagtaacctggccccacaaaccttcaaatgaacgaatcaaattaacaaccataggatgataatgcgattagttttttagccttatttctggggtaattaatcagcgaagcgatgatttttgatctattaacagatatataaatgcaaaaactgcataaccactttaactaatactttcaacattttcggtttgtattacttcttattcaaatgtaataaaagtatcaacaaaaaattgttaatatacctctatactttaacgtcaaggagaaaaaaccccggatcggactactagcagctgtaatacgactcactatagggaatattaagcttaaacaatgaggcaggtttggttctcttggattgtgggattgttcctatgttttttcaacgtgtcttctgctgctccagtcaacactacaacagaagatgaaacggcacaaattccggctgaagctgtcatcggttactcagatttagaaggggatttcgatgttgctgttttgccattttccaacagcacaaataacgggttattgtttataaatactactattgccagcattgctgctaaagaagaaggggtatctctcgagaaaagagaggctgaagctatgccatgggaaaacttcttgaagtgcttctcccaatatatcccaaacaacgagactaacttaaagttagtttacactcaaaacaatccattatacatgtctgtcttaaactctactattcataacttaagatttacttccgatcggacccctaagccattggttatcgtcaccccaacgcacgtctcccatatccaaggtactatcttatgttctaagaaggttggtttgcaaatccgtactagatctggtggtcacgacgctgaaggtatgtcctatatctctcaagtcccatttgtcattgttgacttaagaaatatgagatccattaaaattgatgttcattctcaaactgcttgggtcgaagctggtgccaccttgggtgaagtttactactgggtcaacgaaaaaaacgaaaacttatctttagctgccggttactgtccaaccgtctgtgctggtggtcatttcggtggtggtggttacggtccattgatgcgtaactacggtttagctgctgacaacattattgacgctcatttagttaatgttcacggtaaggttttggacagaaaatctatgggtgaagatttattttgggccttgagaggtggtggtgctgaatccttcggtatcatcgttgcctggaagattcgtttagttgctgtcccttctaagtccaccatgttctccgtcaagaaaatcatggaaattcatgagttggtcaaattggttaacaagtggcaaaacatcgcttacaagtatgacaaggatttgttgttaatgactcacttcatcacccgtaatatcaccgacaaccaaggtaagaacaaaactgctattcacacctacttctcctccgtttttttgggtggtgtcgactccttagtcgatttgatgaacaaatcctttccagaattgggtattaagaaaactgattgtagacaattgtcttggattgacaccattatcttctattctggtgtcgttaactacgacaccgacaactttaacaaggaaattttgttggatcgttctgctggtcaaaatggtgccttcaaaatcaaattggactacgtcaaaaagccaatcccagaatctgttttcgttcaaattttggaaaagttgtacgaagaagacattggtgccggtatgtatgctttgtatccatatggtggtatcatggacgaaatttccgaatctgccatcccattcccacacagagctggtattttatatgaattgtggtacatctgttcttgggaaaagcaagaagacaacgaaaagcatttaaactggattagaaacatttacaacttcatgaccccatacgtttctaagaacccaagattagcctatttgaactaccgtgacttagatattggtattaatgacccaaagaacccaaacaactatactcaagccagaatttggggtgaaaagtacttcggtaagaacttcgatagattagttaaggttaaaactttggtcgatccaaacaacttcttcagaaacgaacaatccatcccaccattgccaagacatcgtcacggccatcatcaccatcaccattagctcgagcatgcatctagagggccgcatcatgtaattagttatgtcacgcttacattcacgccctccccccacatccgctctaaccgaaaaggaaggagttagacaacctgaagtctaggtccctatttatttttttatagttatgttagtattaagaacgttatttatatttcaaatttttcttttttttctgtacagacgcgtgtacgcatgtaacattatactgaaaaccttgcttgagaaggttttgggacgctcgaaggctttaatttgcggccctgcattaatgaatcggccaacgcgcggggagaggcggtttgcgtattgggcgctcttccgcttcctcgctcactgactcgctgcgctcggtcgttcggctgcggcgagcggtatcagctcactcaaaggcggtaatacggttatccacagaatcaggggataacgcaggaaagaacatgtgagcaaaaggccagcaaaagcccaggaaccgtaaaaaggccgcgttgctggcgtttttccataggctccgcccccctgacgagcatcacaaaaatcgacgctcaagtcagaggtggcgaaacccgacaggactataaagataccaggcgtttccccctggaagctccctcgtgcgctctcctgttccgaccctgccgcttaccggatacctgtccgcctttctcccttcgggaagcgtggcgctttctcatagctcacgctgtaggtatctcagttcggtgtaggtcgttcgctccaagctgggctgtgtgcacgaaccccccgttcagcccgaccgctgcgccttatccggtaactatcgtcttgagtccaacccggtaagacacgacttatcgccactggcagcagccactggtaacaggattagcagagcgaggtatgtaggcggtgctacagagttcttgaagtggtggcctaactacggctacactagaagaacagtatttggtatctgcgctctgctgaagccagttaccttcggaaaaagagttggtagctcttgatccggcaaacaaaccaccgctggtagcggtggtttttttgtttgcaagcagcagattacgcgcagaaaaaaaggatctcaagaagatcctttgatcttttctacggggtctgacgctcagtggaacgaaaactcacgttaagggattttggtcatgagattatcaaaaaggatcttcacctagatccttttaaattaaaaatgaagttttaaatcaatctaaagtatatatgagtaaacttggtctgacagttaccaatgcttaatcagtgaggcacctatctcagcgatctgtctatttcgttcatccatagttgcctgactccccgtcgtgtagataactacgatacgggagcgcttaccatctggccccagtgctgcaatgataccgcgagacccacgctcaccggctccagatttatcagcaataaaccagccagccggaagggccgagcgcagaagtggtcctgcaactttatccgcctccattcagtctattaattgttgccgggaagctagagtaagtagttcgccagttaatagtttgcgcaacgttgttggcattgctacaggcatcgtggtgtcactctcgtcgtttggtatggcttcattcagctccggttcccaacgatcaaggcgagttacatgatcccccatgttgtgcaaaaaagcggttagctccttcggtcctccgatcgttgtcagaagtaagttggccgcagtgttatcactcatggttatggcagcactgcataattctcttactgtcatgccatccgtaagatgcttttctgtgactggtgagtactcaaccaagtcattctgagaatagtgtatgcggcgaccgagttgctcttgcccggcgtcaatacgggataatagtgtatcacatagcagaactttaaaagtgctcatcattggaaaacgttcttcggggcgaaaactctcaaggatcttaccgctgttgagatccagttcgatgtaacccactcgtgcacccaactgatcttcagcatcttttactttcaccagcgtttctgggtgagcaaaaacaggaaggcaaaatgccgcaaaaaagggaataagggcgacacggaaatgttgaatactcatactcttcctttttcaatgggtaataactgatataattaaattgaagctctaatttgtgagtttagtatacatgcatttacttataatacagttttttagttttgctggccgcatcttctcaaatatgcttcccagcctgcttttctgtaacgttcaccctctaccttagcatcccttccctttgcaaatagtcctcttccaacaataataatgtcagatcctgtagagaccacatcatccacggttctatactgttgacccaatgcgtctcccttgtcatctaaacccacaccgggtgtcataatcaaccaatcgtaaccttcatctcttccacccatgtctctttgagcaataaagccgataacaaaatctttgtcgctcttcgcaatgtcaacagtacccttagtatattctccagtagatagggagcccttgcatgacaattctgctaacatcaaaaggcctctaggttcctttgttacttcttctgccgcctgcttcaaaccgctaacaatacctgggcccaccacaccgtgtgcattcgtaatgtctgcccattctgctattctgtatacacccgcagagtactgcaatttgactgtattaccaatgtcagcaaattttctgtcttcg

SEQ ID NO: 9 - DNA, 7266 bp, Artificial Sequence
  OXC154-R3V/T49R/S60T/S88A(=GCT)
aagagtaaaaaattgtacttggcggataatgcctttagcggcttaactgtgccctccatggaaaaatcagtcaagatatccacatgtgtttttagtaaacaaattttgggacctaatgcttcaactaactccagtaattccttggtggtacgaacatccaatgaagcacacaagtttgtttgcttttcgtgcatgatattaaatagcttggcagcaacaggactaggatgagtagcagcacgttccttatatgtagctttcgacatgatttatcttcgtttcctgcaggtttttgttctgtgcagttgggttaagaatactgggcaatttcatgtttcttcaacactacatatgcgtatatataccaatctaagtctgtgctccttccttcgttcttccttctgttcggagattaccgaatcaaaaaaatttcaaagaaaccgaaatcaaaaaaaagaataaaaaaaaaatgatgaattgaattgaaaagctagcttatcgatgataagctgtcaaagatgagaattaattccacggactatagactatactagatactccgtctactgtacgatacacttccgctcaggtccttgtcctttaacgaggccttaccactcttttgttactctattgatccagctcagcaaaggcagtgtgatctaagattctatcttcgcgatgtagtaaaactagctagaccgagaaagagactagaaatgcaaaaggcacttctacaatggctgccatcattattatccgatgtgacgctgcagcttctcaatgatattcgaatacgctttgaggagatacagcctaatatccgacaaactgttttacagatttacgatcgtacttgttacccatcattgaattttgaacatccgaacctgggagttttccctgaaacagatagtatatttgaacctgtataataatatatagtctagcgctttacggaagacaatgtatgtatttcggttcctggagaaactattgcatctattgcataggtaatcttgcacgtcgcatccccggttcattttctgcgtttccatcttgcacttcaatagcatatctttgttcgcttgcctgtaacttacacgcgcctcgtatcttttaatgatggaataatttgggaatttactctgtgtttatttatttttatgttttgtatttggattttagaaagtaaataaagaaggtagaagagttacggaatgaagaaaaaaaaataaacaaaggtttaaaaaatttcaacaaaaagcgtactttacatatatatttattagacaagaaaagcagattaaatagatatacattcgattaacgataagtaaaatgtaaaatcacaggattttcgtgtgtggtcttctacacagacaagatgaaacaattcggcattaatacctgagagcaggaagagcaagataaaaggtagtatttgttggcgatccccctagagtcttttacatcttcggaaaacaaaaactattttttctttaatttctttttttactttctatttttaatttatatatttatattaaaaaatttaaattataattatttttatagcacgtgatgaaaaggaccgggaagctccaccccggttgataatcagaaaagccccaaaaacaggaagattgtataagcaaatatttaaattgtaaacgttaatattttgttaaaattcgcgttaaatttttgttaaatcagctcattttttaacgaatagcccgaaatcggcaaaatcccttataaatcaaaagaatagaccgagatagggttgagtgttgttccagtttccaacaagagtccactattaaagaacgtggactccaacgtcaaagggcgaaaaagggtctatcagggcgatggcccactacgtgaaccatcaccctaatcaagttttttggggtcgaggtgccgtaaagcagtaaatcggaagggtaaacggatgcccccatttagagcttgacggggaaagccggcgaacgtggcgagaaaggaagggaagaaagcgaaaggagcgggggctagggcggtgggaagtgtaggggtcacgctgggcgtaaccaccacacccgccgcgcttaatggggcgctacagggcgcgtggggatgatccactagtacggattagaagccgccgagcgggtgacagccctccgaaggaagactctcctccgtgcgtcctcgtcttcaccggtcgcgttcctgaaacgcagatgtgcctcgcgccgcactgctccgaacaataaagattctacaatactagcttttatggttatgaagaggaaaaattggcagtaacctggccccacaaaccttcaaatgaacgaatcaaattaacaaccataggatgataatgcgattagttttttagccttatttctggggtaattaatcagcgaagcgatgatttttgatctattaacagatatataaatgcaaaaactgcataaccactttaactaatactttcaacattttcggtttgtattacttcttattcaaatgtaataaaagtatcaacaaaaaattgttaatatacctctatactttaacgtcaaggagaaaaaaccccggatcggactactagcagctgtaatacgactcactatagggaatattaagcttaaacaatgaggcaggtttggttctcttggattgtgggattgttcctatgttttttcaacgtgtcttctgctgctccagtcaacactacaacagaagatgaaacggcacaaattccggctgaagctgtcatcggttactcagatttagaaggggatttcgatgttgctgttttgccattttccaacagcacaaataacgggttattgtttataaatactactattgccagcattgctgctaaagaagaaggggtatctctcgagaaaagagaggctgaagctatgccagtcgaaaacttcttgaagtgcttctcccaatatatcccaaacaacgctactaacttaaagttagtttacactcaaaacaatccattatacatgtctgtcttaaactctactattcataacttaagatttacttccgatcggacccctaagccattggttatcgtcaccccaacgcacgtctcccatatccaaggtactatcttatgttctaagaaggttggtttgcaaatccgtactagatctggtggtcacgacgctgaaggtatgtcctatatctctcaagtcccatttgtcattgttgacttaagaaatatgagatccattaaaattgatgttcattctcaaactgcttgggtcgaagctggtgccaccttgggtgaagtttactactgggtcaacgaaaaaaacgaaaacttatctttagctgccggttactgtccaaccgtctgtgctggtggtcatttcggtggtggtggttacggtccattgatgcgtaactacggtttagctgctgacaacattattgacgctcatttagttaatgttcacggtaaggttttggacagaaaatctatgggtgaagatttattttgggccttgagaggtggtggtgctgaatccttcggtatcatcgttgcctggaagattcgtttagttgctgtcccttctaagtccaccatgttctccgtcaagaaaatcatggaaattcatgagttggtcaaattggttaacaagtggcaaaacatcgcttacaagtatgacaaggatttgttgttaatgactcacttcatcacccgtaatatcaccgacaaccaaggtaagaacaaaactgctattcacacctacttctcctccgtttttttgggtggtgtcgactccttagtcgatttgatgaacaaatcctttccagaattgggtattaagaaaactgattgtagacaattgtcttggattgacaccattatcttctattctggtgtcgttaactacgacaccgacaactttaacaaggaaattttgttggatcgttctgctggtcaaaatggtgccttcaaaatcaaattggactacgtcaaaaagccaatcccagaatctgttttcgttcaaattttggaaaagttgtacgaagaagacattggtgccggtatgtatgctttgtatccatatggtggtatcatggacgaaatttccgaatctgccatcccattcccacacagagctggtattttatatgaattgtggtacatctgttcttgggaaaagcaagaagacaacgaaaagcatttaaactggattagaaacatttacaacttcatgaccccatacgtttctaagaacccaagattagcctatttgaactaccgtgacttagatattggtattaatgacccaaagaacccaaacaactatactcaagccagaatttggggtgaaaagtacttcggtaagaacttcgatagattagttaaggttaaaactttggtcgatccaaacaacttcttcagaaacgaacaatccatcccaccattgccaagacatcgtcacggccatcatcaccatcaccattagctcgagcatgcatctagagggccgcatcatgtaattagttatgtcacgcttacattcacgccctccccccacatccgctctaaccgaaaaggaaggagttagacaacctgaagtctaggtccctatttatttttttatagttatgttagtattaagaacgttatttatatttcaaatttttcttttttttctgtacagacgcgtgtacgcatgtaacattatactgaaaaccttgcttgagaaggttttgggacgctcgaaggctttaatttgcggccctgcattaatgaatcggccaacgcgcggggagaggcggtttgcgtattgggcgctcttccgcttcctcgctcactgactcgctgcgctcggtcgttcggctgcggcgagcggtatcagctcactcaaaggcggtaatacggttatccacagaatcaggggataacgcaggaaagaacatgtgagcaaaaggccagcaaaagcccaggaaccgtaaaaaggccgcgttgctggcgtttttccataggctccgcccccctgacgagcatcacaaaaatcgacgctcaagtcagaggtggcgaaacccgacaggactataaagataccaggcgtttccccctggaagctccctcgtgcgctctcctgttccgaccctgccgcttaccggatacctgtccgcctttctcccttcgggaagcgtggcgctttctcatagctcacgctgtaggtatctcagttcggtgtaggtcgttcgctccaagctgggctgtgtgcacgaaccccccgttcagcccgaccgctgcgccttatccggtaactatcgtcttgagtccaacccggtaagacacgacttatcgccactggcagcagccactggtaacaggattagcagagcgaggtatgtaggcggtgctacagagttcttgaagtggtggcctaactacggctacactagaagaacagtatttggtatctgcgctctgctgaagccagttaccttcggaaaaagagttggtagctcttgatccggcaaacaaaccaccgctggtagcggtggtttttttgtttgcaagcagcagattacgcgcagaaaaaaaggatctcaagaagatcctttgatcttttctacggggtctgacgctcagtggaacgaaaactcacgttaagggattttggtcatgagattatcaaaaaggatcttcacctagatccttttaaattaaaaatgaagttttaaatcaatctaaagtatatatgagtaaacttggtctgacagttaccaatgcttaatcagtgaggcacctatctcagcgatctgtctatttcgttcatccatagttgcctgactccccgtcgtgtagataactacgatacgggagcgcttaccatctggccccagtgctgcaatgataccgcgagacccacgctcaccggctccagatttatcagcaataaaccagccagccggaagggccgagcgcagaagtggtcctgcaactttatccgcctccattcagtctattaattgttgccgggaagctagagtaagtagttcgccagttaatagtttgcgcaacgttgttggcattgctacaggcatcgtggtgtcactctcgtcgtttggtatggcttcattcagctccggttcccaacgatcaaggcgagttacatgatcccccatgttgtgcaaaaaagcggttagctccttcggtcctccgatcgttgtcagaagtaagttggccgcagtgttatcactcatggttatggcagcactgcataattctcttactgtcatgccatccgtaagatgcttttctgtgactggtgagtactcaaccaagtcattctgagaatagtgtatgcggcgaccgagttgctcttgcccggcgtcaatacgggataatagtgtatcacatagcagaactttaaaagtgctcatcattggaaaacgttcttcggggcgaaaactctcaaggatcttaccgctgttgagatccagttcgatgtaacccactcgtgcacccaactgatcttcagcatcttttactttcaccagcgtttctgggtgagcaaaaacaggaaggcaaaatgccgcaaaaaagggaataagggcgacacggaaatgttgaatactcatactcttcctttttcaatgggtaataactgatataattaaattgaagctctaatttgtgagtttagtatacatgcatttacttataatacagttttttagttttgctggccgcatcttctcaaatatgcttcccagcctgcttttctgtaacgttcaccctctaccttagcatcccttccctttgcaaatagtcctcttccaacaataataatgtcagatcctgtagagaccacatcatccacggttctatactgttgacccaatgcgtctcccttgtcatctaaacccacaccgggtgtcataatcaaccaatcgtaaccttcatctcttccacccatgtctctttgagcaataaagccgataacaaaatctttgtcgctcttcgcaatgtcaacagtacccttagtatattctccagtagatagggagcccttgcatgacaattctgctaacatcaaaaggcctctaggttcctttgttacttcttctgccgcctgcttcaaaccgctaacaatacctgggcccaccacaccgtgtgcattcgtaatgtctgcccattctgctattctgtatacacccgcagagtactgcaatttgactgtattaccaatgtcagcaaattttctgtcttcg

SEQ ID NO: 10 - DNA, 7266 bp, Artificial Sequence
  OXC154-R3V/T49R/S60T/S88A(=GCC)
aagagtaaaaaattgtacttggcggataatgcctttagcggcttaactgtgccctccatggaaaaatcagtcaagatatccacatgtgtttttagtaaacaaattttgggacctaatgcttcaactaactccagtaattccttggtggtacgaacatccaatgaagcacacaagtttgtttgcttttcgtgcatgatattaaatagcttggcagcaacaggactaggatgagtagcagcacgttccttatatgtagctttcgacatgatttatcttcgtttcctgcaggtttttgttctgtgcagttgggttaagaatactgggcaatttcatgtttcttcaacactacatatgcgtatatataccaatctaagtctgtgctccttccttcgttcttccttctgttcggagattaccgaatcaaaaaaatttcaaagaaaccgaaatcaaaaaaaagaataaaaaaaaaatgatgaattgaattgaaaagctagcttatcgatgataagctgtcaaagatgagaattaattccacggactatagactatactagatactccgtctactgtacgatacacttccgctcaggtccttgtcctttaacgaggccttaccactcttttgttactctattgatccagctcagcaaaggcagtgtgatctaagattctatcttcgcgatgtagtaaaactagctagaccgagaaagagactagaaatgcaaaaggcacttctacaatggctgccatcattattatccgatgtgacgctgcagcttctcaatgatattcgaatacgctttgaggagatacagcctaatatccgacaaactgttttacagatttacgatcgtacttgttacccatcattgaattttgaacatccgaacctgggagttttccctgaaacagatagtatatttgaacctgtataataatatatagtctagcgctttacggaagacaatgtatgtatttcggttcctggagaaactattgcatctattgcataggtaatcttgcacgtcgcatccccggttcattttctgcgtttccatcttgcacttcaatagcatatctttgttcgcttgcctgtaacttacacgcgcctcgtatcttttaatgatggaataatttgggaatttactctgtgtttatttatttttatgttttgtatttggattttagaaagtaaataaagaaggtagaagagttacggaatgaagaaaaaaaaataaacaaaggtttaaaaaatttcaacaaaaagcgtactttacatatatatttattagacaagaaaagcagattaaatagatatacattcgattaacgataagtaaaatgtaaaatcacaggattttcgtgtgtggtcttctacacagacaagatgaaacaattcggcattaatacctgagagcaggaagagcaagataaaaggtagtatttgttggcgatccccctagagtcttttacatcttcggaaaacaaaaactattttttctttaatttctttttttactttctatttttaatttatatatttatattaaaaaatttaaattataattatttttatagcacgtgatgaaaaggaccgggaagctccaccccggttgataatcagaaaagccccaaaaacaggaagattgtataagcaaatatttaaattgtaaacgttaatattttgttaaaattcgcgttaaatttttgttaaatcagctcattttttaacgaatagcccgaaatcggcaaaatcccttataaatcaaaagaatagaccgagatagggttgagtgttgttccagtttccaacaagagtccactattaaagaacgtggactccaacgtcaaagggcgaaaaagggtctatcagggcgatggcccactacgtgaaccatcaccctaatcaagttttttggggtcgaggtgccgtaaagcagtaaatcggaagggtaaacggatgcccccatttagagcttgacggggaaagccggcgaacgtggcgagaaaggaagggaagaaagcgaaaggagcgggggctagggcggtgggaagtgtaggggtcacgctgggcgtaaccaccacacccgccgcgcttaatggggcgctacagggcgcgtggggatgatccactagtacggattagaagccgccgagcgggtgacagccctccgaaggaagactctcctccgtgcgtcctcgtcttcaccggtcgcgttcctgaaacgcagatgtgcctcgcgccgcactgctccgaacaataaagattctacaatactagcttttatggttatgaagaggaaaaattggcagtaacctggccccacaaaccttcaaatgaacgaatcaaattaacaaccataggatgataatgcgattagttttttagccttatttctggggtaattaatcagcgaagcgatgatttttgatctattaacagatatataaatgcaaaaactgcataaccactttaactaatactttcaacattttcggtttgtattacttcttattcaaatgtaataaaagtatcaacaaaaaattgttaatatacctctatactttaacgtcaaggagaaaaaaccccggatcggactactagcagctgtaatacgactcactatagggaatattaagcttaaacaatgaggcaggtttggttctcttggattgtgggattgttcctatgttttttcaacgtgtcttctgctgctccagtcaacactacaacagaagatgaaacggcacaaattccggctgaagctgtcatcggttactcagatttagaaggggatttcgatgttgctgttttgccattttccaacagcacaaataacgggttattgtttataaatactactattgccagcattgctgctaaagaagaaggggtatctctcgagaaaagagaggctgaagctatgccagtcgaaaacttcttgaagtgcttctcccaatatatcccaaacaacgctactaacttaaagttagtttacactcaaaacaatccattatacatgtctgtcttaaactctactattcataacttaagatttacttccgatcggacccctaagccattggttatcgtcaccccaacgcacgtctcccatatccaaggtactatcttatgttctaagaaggttggtttgcaaatccgtactagatctggtggtcacgacgccgaaggtatgtcctatatctctcaagtcccatttgtcattgttgacttaagaaatatgagatccattaaaattgatgttcattctcaaactgcttgggtcgaagctggtgccaccttgggtgaagtttactactgggtcaacgaaaaaaacgaaaacttatctttagctgccggttactgtccaaccgtctgtgctggtggtcatttcggtggtggtggttacggtccattgatgcgtaactacggtttagctgctgacaacattattgacgctcatttagttaatgttcacggtaaggttttggacagaaaatctatgggtgaagatttattttgggccttgagaggtggtggtgctgaatccttcggtatcatcgttgcctggaagattcgtttagttgctgtcccttctaagtccaccatgttctccgtcaagaaaatcatggaaattcatgagttggtcaaattggttaacaagtggcaaaacatcgcttacaagtatgacaaggatttgttgttaatgactcacttcatcacccgtaatatcaccgacaaccaaggtaagaacaaaactgctattcacacctacttctcctccgtttttttgggtggtgtcgactccttagtcgatttgatgaacaaatcctttccagaattgggtattaagaaaactgattgtagacaattgtcttggattgacaccattatcttctattctggtgtcgttaactacgacaccgacaactttaacaaggaaattttgttggatcgttctgctggtcaaaatggtgccttcaaaatcaaattggactacgtcaaaaagccaatcccagaatctgttttcgttcaaattttggaaaagttgtacgaagaagacattggtgccggtatgtatgctttgtatccatatggtggtatcatggacgaaatttccgaatctgccatcccattcccacacagagctggtattttatatgaattgtggtacatctgttcttgggaaaagcaagaagacaacgaaaagcatttaaactggattagaaacatttacaacttcatgaccccatacgtttctaagaacccaagattagcctatttgaactaccgtgacttagatattggtattaatgacccaaagaacccaaacaactatactcaagccagaatttggggtgaaaagtacttcggtaagaacttcgatagattagttaaggttaaaactttggtcgatccaaacaacttcttcagaaacgaacaatccatcccaccattgccaagacatcgtcacggccatcatcaccatcaccattagctcgagcatgcatctagagggccgcatcatgtaattagttatgtcacgcttacattcacgccctccccccacatccgctctaaccgaaaaggaaggagttagacaacctgaagtctaggtccctatttatttttttatagttatgttagtattaagaacgttatttatatttcaaatttttcttttttttctgtacagacgcgtgtacgcatgtaacattatactgaaaaccttgcttgagaaggttttgggacgctcgaaggctttaatttgcggccctgcattaatgaatcggccaacgcgcggggagaggcggtttgcgtattgggcgctcttccgcttcctcgctcactgactcgctgcgctcggtcgttcggctgcggcgagcggtatcagctcactcaaaggcggtaatacggttatccacagaatcaggggataacgcaggaaagaacatgtgagcaaaaggccagcaaaagcccaggaaccgtaaaaaggccgcgttgctggcgtttttccataggctccgcccccctgacgagcatcacaaaaatcgacgctcaagtcagaggtggcgaaacccgacaggactataaagataccaggcgtttccccctggaagctccctcgtgcgctctcctgttccgaccctgccgcttaccggatacctgtccgcctttctcccttcgggaagcgtggcgctttctcatagctcacgctgtaggtatctcagttcggtgtaggtcgttcgctccaagctgggctgtgtgcacgaaccccccgttcagcccgaccgctgcgccttatccggtaactatcgtcttgagtccaacccggtaagacacgacttatcgccactggcagcagccactggtaacaggattagcagagcgaggtatgtaggcggtgctacagagttcttgaagtggtggcctaactacggctacactagaagaacagtatttggtatctgcgctctgctgaagccagttaccttcggaaaaagagttggtagctcttgatccggcaaacaaaccaccgctggtagcggtggtttttttgtttgcaagcagcagattacgcgcagaaaaaaaggatctcaagaagatcctttgatcttttctacggggtctgacgctcagtggaacgaaaactcacgttaagggattttggtcatgagattatcaaaaaggatcttcacctagatccttttaaattaaaaatgaagttttaaatcaatctaaagtatatatgagtaaacttggtctgacagttaccaatgcttaatcagtgaggcacctatctcagcgatctgtctatttcgttcatccatagttgcctgactccccgtcgtgtagataactacgatacgggagcgcttaccatctggccccagtgctgcaatgataccgcgagacccacgctcaccggctccagatttatcagcaataaaccagccagccggaagggccgagcgcagaagtggtcctgcaactttatccgcctccattcagtctattaattgttgccgggaagctagagtaagtagttcgccagttaatagtttgcgcaacgttgttggcattgctacaggcatcgtggtgtcactctcgtcgtttggtatggcttcattcagctccggttcccaacgatcaaggcgagttacatgatcccccatgttgtgcaaaaaagcggttagctccttcggtcctccgatcgttgtcagaagtaagttggccgcagtgttatcactcatggttatggcagcactgcataattctcttactgtcatgccatccgtaagatgcttttctgtgactggtgagtactcaaccaagtcattctgagaatagtgtatgcggcgaccgagttgctcttgcccggcgtcaatacgggataatagtgtatcacatagcagaactttaaaagtgctcatcattggaaaacgttcttcggggcgaaaactctcaaggatcttaccgctgttgagatccagttcgatgtaacccactcgtgcacccaactgatcttcagcatcttttactttcaccagcgtttctgggtgagcaaaaacaggaaggcaaaatgccgcaaaaaagggaataagggcgacacggaaatgttgaatactcatactcttcctttttcaatgggtaataactgatataattaaattgaagctctaatttgtgagtttagtatacatgcatttacttataatacagttttttagttttgctggccgcatcttctcaaatatgcttcccagcctgcttttctgtaacgttcaccctctaccttagcatcccttccctttgcaaatagtcctcttccaacaataataatgtcagatcctgtagagaccacatcatccacggttctatactgttgacccaatgcgtctcccttgtcatctaaacccacaccgggtgtcataatcaaccaatcgtaaccttcatctcttccacccatgtctctttgagcaataaagccgataacaaaatctttgtcgctcttcgcaatgtcaacagtacccttagtatattctccagtagatagggagcccttgcatgacaattctgctaacatcaaaaggcctctaggttcctttgttacttcttctgccgcctgcttcaaaccgctaacaatacctgggcccaccacaccgtgtgcattcgtaatgtctgcccattctgctattctgtatacacccgcagagtactgcaatttgactgtattaccaatgtcagcaaattttctgtcttcg

SEQ ID NO: 11 - DNA, 7266 bp, Artificial Sequence
  OXC154-A18A(=GCC)
aagagtaaaaaattgtacttggcggataatgcctttagcggcttaactgtgccctccatggaaaaatcagtcaagatatccacatgtgtttttagtaaacaaattttgggacctaatgcttcaactaactccagtaattccttggtggtacgaacatccaatgaagcacacaagtttgtttgcttttcgtgcatgatattaaatagcttggcagcaacaggactaggatgagtagcagcacgttccttatatgtagctttcgacatgatttatcttcgtttcctgcaggtttttgttctgtgcagttgggttaagaatactgggcaatttcatgtttcttcaacactacatatgcgtatatataccaatctaagtctgtgctccttccttcgttcttccttctgttcggagattaccgaatcaaaaaaatttcaaagaaaccgaaatcaaaaaaaagaataaaaaaaaaatgatgaattgaattgaaaagctagcttatcgatgataagctgtcaaagatgagaattaattccacggactatagactatactagatactccgtctactgtacgatacacttccgctcaggtccttgtcctttaacgaggccttaccactcttttgttactctattgatccagctcagcaaaggcagtgtgatctaagattctatcttcgcgatgtagtaaaactagctagaccgagaaagagactagaaatgcaaaaggcacttctacaatggctgccatcattattatccgatgtgacgctgcagcttctcaatgatattcgaatacgctttgaggagatacagcctaatatccgacaaactgttttacagatttacgatcgtacttgttacccatcattgaattttgaacatccgaacctgggagttttccctgaaacagatagtatatttgaacctgtataataatatatagtctagcgctttacggaagacaatgtatgtatttcggttcctggagaaactattgcatctattgcataggtaatcttgcacgtcgcatccccggttcattttctgcgtttccatcttgcacttcaatagcatatctttgttcgcttgcctgtaacttacacgcgcctcgtatcttttaatgatggaataatttgggaatttactctgtgtttatttatttttatgttttgtatttggattttagaaagtaaataaagaaggtagaagagttacggaatgaagaaaaaaaaataaacaaaggtttaaaaaatttcaacaaaaagcgtactttacatatatatttattagacaagaaaagcagattaaatagatatacattcgattaacgataagtaaaatgtaaaatcacaggattttcgtgtgtggtcttctacacagacaagatgaaacaattcggcattaatacctgagagcaggaagagcaagataaaaggtagtatttgttggcgatccccctagagtcttttacatcttcggaaaacaaaaactattttttctttaatttctttttttactttctatttttaatttatatatttatattaaaaaatttaaattataattatttttatagcacgtgatgaaaaggaccgggaagctccaccccggttgataatcagaaaagccccaaaaacaggaagattgtataagcaaatatttaaattgtaaacgttaatattttgttaaaattcgcgttaaatttttgttaaatcagctcattttttaacgaatagcccgaaatcggcaaaatcccttataaatcaaaagaatagaccgagatagggttgagtgttgttccagtttccaacaagagtccactattaaagaacgtggactccaacgtcaaagggcgaaaaagggtctatcagggcgatggcccactacgtgaaccatcaccctaatcaagttttttggggtcgaggtgccgtaaagcagtaaatcggaagggtaaacggatgcccccatttagagcttgacggggaaagccggcgaacgtggcgagaaaggaagggaagaaagcgaaaggagcgggggctagggcggtgggaagtgtaggggtcacgctgggcgtaaccaccacacccgccgcgcttaatggggcgctacagggcgcgtggggatgatccactagtacggattagaagccgccgagcgggtgacagccctccgaaggaagactctcctccgtgcgtcctcgtcttcaccggtcgcgttcctgaaacgcagatgtgcctcgcgccgcactgctccgaacaataaagattctacaatactagcttttatggttatgaagaggaaaaattggcagtaacctggccccacaaaccttcaaatgaacgaatcaaattaacaaccataggatgataatgcgattagttttttagccttatttctggggtaattaatcagcgaagcgatgatttttgatctattaacagatatataaatgcaaaaactgcataaccactttaactaatactttcaacattttcggtttgtattacttcttattcaaatgtaataaaagtatcaacaaaaaattgttaatatacctctatactttaacgtcaaggagaaaaaaccccggatcggactactagcagctgtaatacgactcactatagggaatattaagcttaaacaatgaggcaggtttggttctcttggattgtgggattgttcctatgttttttcaacgtgtcttctgctgctccagtcaacactacaacagaagatgaaacggcacaaattccggctgaagctgtcatcggttactcagatttagaaggggatttcgatgttgctgttttgccattttccaacagcacaaataacgggttattgtttataaatactactattgccagcattgctgctaaagaagaaggggtatctctcgagaaaagagaggctgaagctatgccaagagaaaacttcttgaagtgcttctcccaatatatcccaaacaacgckactaacttaaagttagtttacactcaaaacaatccattatacatgtctgtcttaaactctactattcataacttaagatttacttccgatactacccctaagccattggttatcgtcaccccatctcacgtctcccatatccaaggtactatcttatgttctaagaaggttggtttgcaaatccgtactagatctggtggtcacgactctgaaggtatgtcctatatctctcaagtcccatttgtcattgttgacttaagaaatatgagatccattaaaattgatgttcattctcaaactgcttgggtcgaagctggtgccaccttgggtgaagtttactactgggtcaacgaaaaaaacgaaaacttatctttagctgccggttactgtccaaccgtctgtgctggtggtcatttcggtggtggtggttacggtccattgatgcgtaactacggtttagctgctgacaacattattgacgctcatttagttaatgttcacggtaaggttttggacagaaaatctatgggtgaagatttattttgggccttgagaggtggtggtgctgaatccttcggtatcatcgttgcctggaagattcgtttagttgctgtcccttctaagtccaccatgttctccgtcaagaaaatcatggaaattcatgagttggtcaaattggttaacaagtggcaaaacatcgcttacaagtatgacaaggatttgttgttaatgactcacttcatcacccgtaatatcaccgacaaccaaggtaagaacaaaactgctattcacacctacttctcctccgtttttttgggtggtgtcgactccttagtcgatttgatgaacaaatcctttccagaattgggtattaagaaaactgattgtagacaattgtcttggattgacaccattatcttctattctggtgtcgttaactacgacaccgacaactttaacaaggaaattttgttggatcgttctgctggtcaaaatggtgccttcaaaatcaaattggactacgtcaaaaagccaatcccagaatctgttttcgttcaaattttggaaaagttgtacgaagaagacattggtgccggtatgtatgctttgtatccatatggtggtatcatggacgaaatttccgaatctgccatcccattcccacacagagctggtattttatatgaattgtggtacatctgttcttgggaaaagcaagaagacaacgaaaagcatttaaactggattagaaacatttacaacttcatgaccccatacgtttctaagaacccaagattagcctatttgaactaccgtgacttagatattggtattaatgacccaaagaacccaaacaactatactcaagccagaatttggggtgaaaagtacttcggtaagaacttcgatagattagttaaggttaaaactttggtcgatccaaacaacttcttcagaaacgaacaatccatcccaccattgccaagacatcgtcacggccatcatcaccatcaccattagctcgagcatgcatctagagggccgcatcatgtaattagttatgtcacgcttacattcacgccctccccccacatccgctctaaccgaaaaggaaggagttagacaacctgaagtctaggtccctatttatttttttatagttatgttagtattaagaacgttatttatatttcaaatttttcttttttttctgtacagacgcgtgtacgcatgtaacattatactgaaaaccttgcttgagaaggttttgggacgctcgaaggctttaatttgcggccctgcattaatgaatcggccaacgcgcggggagaggcggtttgcgtattgggcgctcttccgcttcctcgctcactgactcgctgcgctcggtcgttcggctgcggcgagcggtatcagctcactcaaaggcggtaatacggttatccacagaatcaggggataacgcaggaaagaacatgtgagcaaaaggccagcaaaagcccaggaaccgtaaaaaggccgcgttgctggcgtttttccataggctccgcccccctgacgagcatcacaaaaatcgacgctcaagtcagaggtggcgaaacccgacaggactataaagataccaggcgtttccccctggaagctccctcgtgcgctctcctgttccgaccctgccgcttaccggatacctgtccgcctttctcccttcgggaagcgtggcgctttctcatagctcacgctgtaggtatctcagttcggtgtaggtcgttcgctccaagctgggctgtgtgcacgaaccccccgttcagcccgaccgctgcgccttatccggtaactatcgtcttgagtccaacccggtaagacacgacttatcgccactggcagcagccactggtaacaggattagcagagcgaggtatgtaggcggtgctacagagttcttgaagtggtggcctaactacggctacactagaagaacagtatttggtatctgcgctctgctgaagccagttaccttcggaaaaagagttggtagctcttgatccggcaaacaaaccaccgctggtagcggtggtttttttgtttgcaagcagcagattacgcgcagaaaaaaaggatctcaagaagatcctttgatcttttctacggggtctgacgctcagtggaacgaaaactcacgttaagggattttggtcatgagattatcaaaaaggatcttcacctagatccttttaaattaaaaatgaagttttaaatcaatctaaagtatatatgagtaaacttggtctgacagttaccaatgcttaatcagtgaggcacctatctcagcgatctgtctatttcgttcatccatagttgcctgactccccgtcgtgtagataactacgatacgggagcgcttaccatctggccccagtgctgcaatgataccgcgagacccacgctcaccggctccagatttatcagcaataaaccagccagccggaagggccgagcgcagaagtggtcctgcaactttatccgcctccattcagtctattaattgttgccgggaagctagagtaagtagttcgccagttaatagtttgcgcaacgttgttggcattgctacaggcatcgtggtgtcactctcgtcgtttggtatggcttcattcagctccggttcccaacgatcaaggcgagttacatgatcccccatgttgtgcaaaaaagcggttagctccttcggtcctccgatcgttgtcagaagtaagttggccgcagtgttatcactcatggttatggcagcactgcataattctcttactgtcatgccatccgtaagatgcttttctgtgactggtgagtactcaaccaagtcattctgagaatagtgtatgcggcgaccgagttgctcttgcccggcgtcaatacgggataatagtgtatcacatagcagaactttaaaagtgctcatcattggaaaacgttcttcggggcgaaaactctcaaggatcttaccgctgttgagatccagttcgatgtaacccactcgtgcacccaactgatcttcagcatcttttactttcaccagcgtttctgggtgagcaaaaacaggaaggcaaaatgccgcaaaaaagggaataagggcgacacggaaatgttgaatactcatactcttcctttttcaatgggtaataactgatataattaaattgaagctctaatttgtgagtttagtatacatgcatttacttataatacagttttttagttttgctggccgcatcttctcaaatatgcttcccagcctgcttttctgtaacgttcaccctctaccttagcatcccttccctttgcaaatagtcctcttccaacaataataatgtcagatcctgtagagaccacatcatccacggttctatactgttgacccaatgcgtctcccttgtcatctaaacccacaccgggtgtcataatcaaccaatcgtaaccttcatctcttccacccatgtctctttgagcaataaagccgataacaaaatctttgtcgctcttcgcaatgtcaacagtacccttagtatattctccagtagatagggagcccttgcatgacaattctgctaacatcaaaaggcctctaggttcctttgttacttcttctgccgcctgcttcaaaccgctaacaatacctgggcccaccacaccgtgtgcattcgtaatgtctgcccattctgctattctgtatacacccgcagagtactgcaatttgactgtattaccaatgtcagcaaattttctgtcttcg

SEQ ID NO: 12 - DNA, 7266 bp, Artificial Sequence
  OXC154-R3T/A18E/T49R/S88A(=GCC)
aagagtaaaaaattgtacttggcggataatgcctttagcggcttaactgtgccctccatggaaaaatcagtcaagatatccacatgtgtttttagtaaacaaattttgggacctaatgcttcaactaactccagtaattccttggtggtacgaacatccaatgaagcacacaagtttgtttgcttttcgtgcatgatattaaatagcttggcagcaacaggactaggatgagtagcagcacgttccttatatgtagctttcgacatgatttatcttcgtttcctgcaggtttttgttctgtgcagttgggttaagaatactgggcaatttcatgtttcttcaacactacatatgcgtatatataccaatctaagtctgtgctccttccttcgttcttccttctgttcggagattaccgaatcaaaaaaatttcaaagaaaccgaaatcaaaaaaaagaataaaaaaaaaatgatgaattgaattgaaaagctagcttatcgatgataagctgtcaaagatgagaattaattccacggactatagactatactagatactccgtctactgtacgatacacttccgctcaggtccttgtcctttaacgaggccttaccactcttttgttactctattgatccagctcagcaaaggcagtgtgatctaagattctatcttcgcgatgtagtaaaactagctagaccgagaaagagactagaaatgcaaaaggcacttctacaatggctgccatcattattatccgatgtgacgctgcagcttctcaatgatattcgaatacgctttgaggagatacagcctaatatccgacaaactgttttacagatttacgatcgtacttgttacccatcattgaattttgaacatccgaacctgggagttttccctgaaacagatagtatatttgaacctgtataataatatatagtctagcgctttacggaagacaatgtatgtatttcggttcctggagaaactattgcatctattgcataggtaatcttgcacgtcgcatccccggttcattttctgcgtttccatcttgcacttcaatagcatatctttgttcgcttgcctgtaacttacacgcgcctcgtatcttttaatgatggaataatttgggaatttactctgtgtttatttatttttatgttttgtatttggattttagaaagtaaataaagaaggtagaagagttacggaatgaagaaaaaaaaataaacaaaggtttaaaaaatttcaacaaaaagcgtactttacatatatatttattagacaagaaaagcagattaaatagatatacattcgattaacgataagtaaaatgtaaaatcacaggattttcgtgtgtggtcttctacacagacaagatgaaacaattcggcattaatacctgagagcaggaagagcaagataaaaggtagtatttgttggcgatccccctagagtcttttacatcttcggaaaacaaaaactattttttctttaatttctttttttactttctatttttaatttatatatttatattaaaaaatttaaattataattatttttatagcacgtgatgaaaaggaccgggaagctccaccccggttgataatcagaaaagccccaaaaacaggaagattgtataagcaaatatttaaattgtaaacgttaatattttgttaaaattcgcgttaaatttttgttaaatcagctcattttttaacgaatagcccgaaatcggcaaaatcccttataaatcaaaagaatagaccgagatagggttgagtgttgttccagtttccaacaagagtccactattaaagaacgtggactccaacgtcaaagggcgaaaaagggtctatcagggcgatggcccactacgtgaaccatcaccctaatcaagttttttggggtcgaggtgccgtaaagcagtaaatcggaagggtaaacggatgcccccatttagagcttgacggggaaagccggcgaacgtggcgagaaaggaagggaagaaagcgaaaggagcgggggctagggcggtgggaagtgtaggggtcacgctgggcgtaaccaccacacccgccgcgcttaatggggcgctacagggcgcgtggggatgatccactagtacggattagaagccgccgagcgggtgacagccctccgaaggaagactctcctccgtgcgtcctcgtcttcaccggtcgcgttcctgaaacgcagatgtgcctcgcgccgcactgctccgaacaataaagattctacaatactagcttttatggttatgaagaggaaaaattggcagtaacctggccccacaaaccttcaaatgaacgaatcaaattaacaaccataggatgataatgcgattagttttttagccttatttctggggtaattaatcagcgaagcgatgatttttgatctattaacagatatataaatgcaaaaactgcataaccactttaactaatactttcaacattttcggtttgtattacttcttattcaaatgtaataaaagtatcaacaaaaaattgttaatatacctctatactttaacgtcaaggagaaaaaaccccggatcggactactagcagctgtaatacgactcactatagggaatattaagcttaaacaatgaggcaggtttggttctcttggattgtgggattgttcctatgttttttcaacgtgtcttctgctgctccagtcaacactacaacagaagatgaaacggcacaaattccggctgaagctgtcatcggttactcagatttagaaggggatttcgatgttgctgttttgccattttccaacagcacaaataacgggttattgtttataaatactactattgccagcattgctgctaaagaagaaggggtatctctcgagaaaagagaggctgaagctatgccaacggaaaacttcttgaagtgcttctcccaatatatcccaaacaacgagactaacttaaagttagtttacactcaaaacaatccattatacatgtctgtcttaaactctactattcataacttaagatttacttccgatcggacccctaagccattggttatcgtcaccccatctcacgtctcccatatccaaggtactatcttatgttctaagaaggttggtttgcaaatccgtactagatctggtggtcacgacgccgaaggtatgtcctatatctctcaagtcccatttgtcattgttgacttaagaaatatgagatccattaaaattgatgttcattctcaaactgcttgggtcgaagctggtgccaccttgggtgaagtttactactgggtcaacgaaaaaaacgaaaacttatctttagctgccggttactgtccaaccgtctgtgctggtggtcatttcggtggtggtggttacggtccattgatgcgtaactacggtttagctgctgacaacattattgacgctcatttagttaatgttcacggtaaggttttggacagaaaatctatgggtgaagatttattttgggccttgagaggtggtggtgctgaatccttcggtatcatcgttgcctggaagattcgtttagttgctgtcccttctaagtccaccatgttctccgtcaagaaaatcatggaaattcatgagttggtcaaattggttaacaagtggcaaaacatcgcttacaagtatgacaaggatttgttgttaatgactcacttcatcacccgtaatatcaccgacaaccaaggtaagaacaaaactgctattcacacctacttctcctccgtttttttgggtggtgtcgactccttagtcgatttgatgaacaaatcctttccagaattgggtattaagaaaactgattgtagacaattgtcttggattgacaccattatcttctattctggtgtcgttaactacgacaccgacaactttaacaaggaaattttgttggatcgttctgctggtcaaaatggtgccttcaaaatcaaattggactacgtcaaaaagccaatcccagaatctgttttcgttcaaattttggaaaagttgtacgaagaagacattggtgccggtatgtatgctttgtatccatatggtggtatcatggacgaaatttccgaatctgccatcccattcccacacagagctggtattttatatgaattgtggtacatctgttcttgggaaaagcaagaagacaacgaaaagcatttaaactggattagaaacatttacaacttcatgaccccatacgtttctaagaacccaagattagcctatttgaactaccgtgacttagatattggtattaatgacccaaagaacccaaacaactatactcaagccagaatttggggtgaaaagtacttcggtaagaacttcgatagattagttaaggttaaaactttggtcgatccaaacaacttcttcagaaacgaacaatccatcccaccattgccaagacatcgtcacggccatcatcaccatcaccattagctcgagcatgcatctagagggccgcatcatgtaattagttatgtcacgcttacattcacgccctccccccacatccgctctaaccgaaaaggaaggagttagacaacctgaagtctaggtccctatttatttttttatagttatgttagtattaagaacgttatttatatttcaaatttttcttttttttctgtacagacgcgtgtacgcatgtaacattatactgaaaaccttgcttgagaaggttttgggacgctcgaaggctttaatttgcggccctgcattaatgaatcggccaacgcgcggggagaggcggtttgcgtattgggcgctcttccgcttcctcgctcactgactcgctgcgctcggtcgttcggctgcggcgagcggtatcagctcactcaaaggcggtaatacggttatccacagaatcaggggataacgcaggaaagaacatgtgagcaaaaggccagcaaaagcccaggaaccgtaaaaaggccgcgttgctggcgtttttccataggctccgcccccctgacgagcatcacaaaaatcgacgctcaagtcagaggtggcgaaacccgacaggactataaagataccaggcgtttccccctggaagctccctcgtgcgctctcctgttccgaccctgccgcttaccggatacctgtccgcctttctcccttcgggaagcgtggcgctttctcatagctcacgctgtaggtatctcagttcggtgtaggtcgttcgctccaagctgggctgtgtgcacgaaccccccgttcagcccgaccgctgcgccttatccggtaactatcgtcttgagtccaacccggtaagacacgacttatcgccactggcagcagccactggtaacaggattagcagagcgaggtatgtaggcggtgctacagagttcttgaagtggtggcctaactacggctacactagaagaacagtatttggtatctgcgctctgctgaagccagttaccttcggaaaaagagttggtagctcttgatccggcaaacaaaccaccgctggtagcggtggtttttttgtttgcaagcagcagattacgcgcagaaaaaaaggatctcaagaagatcctttgatcttttctacggggtctgacgctcagtggaacgaaaactcacgttaagggattttggtcatgagattatcaaaaaggatcttcacctagatccttttaaattaaaaatgaagttttaaatcaatctaaagtatatatgagtaaacttggtctgacagttaccaatgcttaatcagtgaggcacctatctcagcgatctgtctatttcgttcatccatagttgcctgactccccgtcgtgtagataactacgatacgggagcgcttaccatctggccccagtgctgcaatgataccgcgagacccacgctcaccggctccagatttatcagcaataaaccagccagccggaagggccgagcgcagaagtggtcctgcaactttatccgcctccattcagtctattaattgttgccgggaagctagagtaagtagttcgccagttaatagtttgcgcaacgttgttggcattgctacaggcatcgtggtgtcactctcgtcgtttggtatggcttcattcagctccggttcccaacgatcaaggcgagttacatgatcccccatgttgtgcaaaaaagcggttagctccttcggtcctccgatcgttgtcagaagtaagttggccgcagtgttatcactcatggttatggcagcactgcataattctcttactgtcatgccatccgtaagatgcttttctgtgactggtgagtactcaaccaagtcattctgagaatagtgtatgcggcgaccgagttgctcttgcccggcgtcaatacgggataatagtgtatcacatagcagaactttaaaagtgctcatcattggaaaacgttcttcggggcgaaaactctcaaggatcttaccgctgttgagatccagttcgatgtaacccactcgtgcacccaactgatcttcagcatcttttactttcaccagcgtttctgggtgagcaaaaacaggaaggcaaaatgccgcaaaaaagggaataagggcgacacggaaatgttgaatactcatactcttcctttttcaatgggtaataactgatataattaaattgaagctctaatttgtgagtttagtatacatgcatttacttataatacagttttttagttttgctggccgcatcttctcaaatatgcttcccagcctgcttttctgtaacgttcaccctctaccttagcatcccttccctttgcaaatagtcctcttccaacaataataatgtcagatcctgtagagaccacatcatccacggttctatactgttgacccaatgcgtctcccttgtcatctaaacccacaccgggtgtcataatcaaccaatcgtaaccttcatctcttccacccatgtctctttgagcaataaagccgataacaaaatctttgtcgctcttcgcaatgtcaacagtacccttagtatattctccagtagatagggagcccttgcatgacaattctgctaacatcaaaaggcctctaggttcctttgttacttcttctgccgcctgcttcaaaccgctaacaatacctgggcccaccacaccgtgtgcattcgtaatgtctgcccattctgctattctgtatacacccgcagagtactgcaatttgactgtattaccaatgtcagcaaattttctgtcttcg

SEQ ID NO: 13 - DNA, 7266 bp, Artificial Sequence
  OXC154-R3T/S88A(=GCC)
aagagtaaaaaattgtacttggcggataatgcctttagcggcttaactgtgccctccatggaaaaatcagtcaagatatccacatgtgtttttagtaaacaaattttgggacctaatgcttcaactaactccagtaattccttggtggtacgaacatccaatgaagcacacaagtttgtttgcttttcgtgcatgatattaaatagcttggcagcaacaggactaggatgagtagcagcacgttccttatatgtagctttcgacatgatttatcttcgtttcctgcaggtttttgttctgtgcagttgggttaagaatactgggcaatttcatgtttcttcaacactacatatgcgtatatataccaatctaagtctgtgctccttccttcgttcttccttctgttcggagattaccgaatcaaaaaaatttcaaagaaaccgaaatcaaaaaaaagaataaaaaaaaaatgatgaattgaattgaaaagctagcttatcgatgataagctgtcaaagatgagaattaattccacggactatagactatactagatactccgtctactgtacgatacacttccgctcaggtccttgtcctttaacgaggccttaccactcttttgttactctattgatccagctcagcaaaggcagtgtgatctaagattctatcttcgcgatgtagtaaaactagctagaccgagaaagagactagaaatgcaaaaggcacttctacaatggctgccatcattattatccgatgtgacgctgcagcttctcaatgatattcgaatacgctttgaggagatacagcctaatatccgacaaactgttttacagatttacgatcgtacttgttacccatcattgaattttgaacatccgaacctgggagttttccctgaaacagatagtatatttgaacctgtataataatatatagtctagcgctttacggaagacaatgtatgtatttcggttcctggagaaactattgcatctattgcataggtaatcttgcacgtcgcatccccggttcattttctgcgtttccatcttgcacttcaatagcatatctttgttcgcttgcctgtaacttacacgcgcctcgtatcttttaatgatggaataatttgggaatttactctgtgtttatttatttttatgttttgtatttggattttagaaagtaaataaagaaggtagaagagttacggaatgaagaaaaaaaaataaacaaaggtttaaaaaatttcaacaaaaagcgtactttacatatatatttattagacaagaaaagcagattaaatagatatacattcgattaacgataagtaaaatgtaaaatcacaggattttcgtgtgtggtcttctacacagacaagatgaaacaattcggcattaatacctgagagcaggaagagcaagataaaaggtagtatttgttggcgatccccctagagtcttttacatcttcggaaaacaaaaactattttttctttaatttctttttttactttctatttttaatttatatatttatattaaaaaatttaaattataattatttttatagcacgtgatgaaaaggaccgggaagctccaccccggttgataatcagaaaagccccaaaaacaggaagattgtataagcaaatatttaaattgtaaacgttaatattttgttaaaattcgcgttaaatttttgttaaatcagctcattttttaacgaatagcccgaaatcggcaaaatcccttataaatcaaaagaatagaccgagatagggttgagtgttgttccagtttccaacaagagtccactattaaagaacgtggactccaacgtcaaagggcgaaaaagggtctatcagggcgatggcccactacgtgaaccatcaccctaatcaagttttttggggtcgaggtgccgtaaagcagtaaatcggaagggtaaacggatgcccccatttagagcttgacggggaaagccggcgaacgtggcgagaaaggaagggaagaaagcgaaaggagcgggggctagggcggtgggaagtgtaggggtcacgctgggcgtaaccaccacacccgccgcgcttaatggggcgctacagggcgcgtggggatgatccactagtacggattagaagccgccgagcgggtgacagccctccgaaggaagactctcctccgtgcgtcctcgtcttcaccggtcgcgttcctgaaacgcagatgtgcctcgcgccgcactgctccgaacaataaagattctacaatactagcttttatggttatgaagaggaaaaattggcagtaacctggccccacaaaccttcaaatgaacgaatcaaattaacaaccataggatgataatgcgattagttttttagccttatttctggggtaattaatcagcgaagcgatgatttttgatctattaacagatatataaatgcaaaaactgcataaccactttaactaatactttcaacattttcggtttgtattacttcttattcaaatgtaataaaagtatcaacaaaaaattgttaatatacctctatactttaacgtcaaggagaaaaaaccccggatcggactactagcagctgtaatacgactcactatagggaatattaagcttaaacaatgaggcaggtttggttctcttggattgtgggattgttcctatgttttttcaacgtgtcttctgctgctccagtcaacactacaacagaagatgaaacggcacaaattccggctgaagctgtcatcggttactcagatttagaaggggatttcgatgttgctgttttgccattttccaacagcacaaataacgggttattgtttataaatactactattgccagcattgctgctaaagaagaaggggtatctctcgagaaaagagaggctgaagctatgccaacggaaaacttcttgaagtgcttctcccaatatatcccaaacaacgctactaacttaaagttagtttacactcaaaacaatccattatacatgtctgtcttaaactctactattcataacttaagatttacttccgatactacccctaagccattggttatcgtcaccccatctcacgtctcccatatccaaggtactatcttatgttctaagaaggttggtttgcaaatccgtactagatctggtggtcacgacgccgaaggtatgtcctatatctctcaagtcccatttgtcattgttgacttaagaaatatgagatccattaaaattgatgttcattctcaaactgcttgggtcgaagctggtgccaccttgggtgaagtttactactgggtcaacgaaaaaaacgaaaacttatctttagctgccggttactgtccaaccgtctgtgctggtggtcatttcggtggtggtggttacggtccattgatgcgtaactacggtttagctgctgacaacattattgacgctcatttagttaatgttcacggtaaggttttggacagaaaatctatgggtgaagatttattttgggccttgagaggtggtggtgctgaatccttcggtatcatcgttgcctggaagattcgtttagttgctgtcccttctaagtccaccatgttctccgtcaagaaaatcatggaaattcatgagttggtcaaattggttaacaagtggcaaaacatcgcttacaagtatgacaaggatttgttgttaatgactcacttcatcacccgtaatatcaccgacaaccaaggtaagaacaaaactgctattcacacctacttctcctccgtttttttgggtggtgtcgactccttagtcgatttgatgaacaaatcctttccagaattgggtattaagaaaactgattgtagacaattgtcttggattgacaccattatcttctattctggtgtcgttaactacgacaccgacaactttaacaaggaaattttgttggatcgttctgctggtcaaaatggtgccttcaaaatcaaattggactacgtcaaaaagccaatcccagaatctgttttcgttcaaattttggaaaagttgtacgaagaagacattggtgccggtatgtatgctttgtatccatatggtggtatcatggacgaaatttccgaatctgccatcccattcccacacagagctggtattttatatgaattgtggtacatctgttcttgggaaaagcaagaagacaacgaaaagcatttaaactggattagaaacatttacaacttcatgaccccatacgtttctaagaacccaagattagcctatttgaactaccgtgacttagatattggtattaatgacccaaagaacccaaacaactatactcaagccagaatttggggtgaaaagtacttcggtaagaacttcgatagattagttaaggttaaaactttggtcgatccaaacaacttcttcagaaacgaacaatccatcccaccattgccaagacatcgtcacggccatcatcaccatcaccattagctcgagcatgcatctagagggccgcatcatgtaattagttatgtcacgcttacattcacgccctccccccacatccgctctaaccgaaaaggaaggagttagacaacctgaagtctaggtccctatttatttttttatagttatgttagtattaagaacgttatttatatttcaaatttttcttttttttctgtacagacgcgtgtacgcatgtaacattatactgaaaaccttgcttgagaaggttttgggacgctcgaaggctttaatttgcggccctgcattaatgaatcggccaacgcgcggggagaggcggtttgcgtattgggcgctcttccgcttcctcgctcactgactcgctgcgctcggtcgttcggctgcggcgagcggtatcagctcactcaaaggcggtaatacggttatccacagaatcaggggataacgcaggaaagaacatgtgagcaaaaggccagcaaaagcccaggaaccgtaaaaaggccgcgttgctggcgtttttccataggctccgcccccctgacgagcatcacaaaaatcgacgctcaagtcagaggtggcgaaacccgacaggactataaagataccaggcgtttccccctggaagctccctcgtgcgctctcctgttccgaccctgccgcttaccggatacctgtccgcctttctcccttcgggaagcgtggcgctttctcatagctcacgctgtaggtatctcagttcggtgtaggtcgttcgctccaagctgggctgtgtgcacgaaccccccgttcagcccgaccgctgcgccttatccggtaactatcgtcttgagtccaacccggtaagacacgacttatcgccactggcagcagccactggtaacaggattagcagagcgaggtatgtaggcggtgctacagagttcttgaagtggtggcctaactacggctacactagaagaacagtatttggtatctgcgctctgctgaagccagttaccttcggaaaaagagttggtagctcttgatccggcaaacaaaccaccgctggtagcggtggtttttttgtttgcaagcagcagattacgcgcagaaaaaaaggatctcaagaagatcctttgatcttttctacggggtctgacgctcagtggaacgaaaactcacgttaagggattttggtcatgagattatcaaaaaggatcttcacctagatccttttaaattaaaaatgaagttttaaatcaatctaaagtatatatgagtaaacttggtctgacagttaccaatgcttaatcagtgaggcacctatctcagcgatctgtctatttcgttcatccatagttgcctgactccccgtcgtgtagataactacgatacgggagcgcttaccatctggccccagtgctgcaatgataccgcgagacccacgctcaccggctccagatttatcagcaataaaccagccagccggaagggccgagcgcagaagtggtcctgcaactttatccgcctccattcagtctattaattgttgccgggaagctagagtaagtagttcgccagttaatagtttgcgcaacgttgttggcattgctacaggcatcgtggtgtcactctcgtcgtttggtatggcttcattcagctccggttcccaacgatcaaggcgagttacatgatcccccatgttgtgcaaaaaagcggttagctccttcggtcctccgatcgttgtcagaagtaagttggccgcagtgttatcactcatggttatggcagcactgcataattctcttactgtcatgccatccgtaagatgcttttctgtgactggtgagtactcaaccaagtcattctgagaatagtgtatgcggcgaccgagttgctcttgcccggcgtcaatacgggataatagtgtatcacatagcagaactttaaaagtgctcatcattggaaaacgttcttcggggcgaaaactctcaaggatcttaccgctgttgagatccagttcgatgtaacccactcgtgcacccaactgatcttcagcatcttttactttcaccagcgtttctgggtgagcaaaaacaggaaggcaaaatgccgcaaaaaagggaataagggcgacacggaaatgttgaatactcatactcttcctttttcaatgggtaataactgatataattaaattgaagctctaatttgtgagtttagtatacatgcatttacttataatacagttttttagttttgctggccgcatcttctcaaatatgcttcccagcctgcttttctgtaacgttcaccctctaccttagcatcccttccctttgcaaatagtcctcttccaacaataataatgtcagatcctgtagagaccacatcatccacggttctatactgttgacccaatgcgtctcccttgtcatctaaacccacaccgggtgtcataatcaaccaatcgtaaccttcatctcttccacccatgtctctttgagcaataaagccgataacaaaatctttgtcgctcttcgcaatgtcaacagtacccttagtatattctccagtagatagggagcccttgcatgacaattctgctaacatcaaaaggcctctaggttcctttgttacttcttctgccgcctgcttcaaaccgctaacaatacctgggcccaccacaccgtgtgcattcgtaatgtctgcccattctgctattctgtatacacccgcagagtactgcaatttgactgtattaccaatgtcagcaaattttctgtcttcg

SEQ ID NO: 14 - DNA, 7266 bp, Artificial Sequence
  OXC154-R3G(=GGG)/L21G/T49R
aagagtaaaaaattgtacttggcggataatgcctttagcggcttaactgtgccctccatggaaaaatcagtcaagatatccacatgtgtttttagtaaacaaattttgggacctaatgcttcaactaactccagtaattccttggtggtacgaacatccaatgaagcacacaagtttgtttgcttttcgtgcatgatattaaatagcttggcagcaacaggactaggatgagtagcagcacgttccttatatgtagctttcgacatgatttatcttcgtttcctgcaggtttttgttctgtgcagttgggttaagaatactgggcaatttcatgtttcttcaacactacatatgcgtatatataccaatctaagtctgtgctccttccttcgttcttccttctgttcggagattaccgaatcaaaaaaatttcaaagaaaccgaaatcaaaaaaaagaataaaaaaaaaatgatgaattgaattgaaaagctagcttatcgatgataagctgtcaaagatgagaattaattccacggactatagactatactagatactccgtctactgtacgatacacttccgctcaggtccttgtcctttaacgaggccttaccactcttttgttactctattgatccagctcagcaaaggcagtgtgatctaagattctatcttcgcgatgtagtaaaactagctagaccgagaaagagactagaaatgcaaaaggcacttctacaatggctgccatcattattatccgatgtgacgctgcagcttctcaatgatattcgaatacgctttgaggagatacagcctaatatccgacaaactgttttacagatttacgatcgtacttgttacccatcattgaattttgaacatccgaacctgggagttttccctgaaacagatagtatatttgaacctgtataataatatatagtctagcgctttacggaagacaatgtatgtatttcggttcctggagaaactattgcatctattgcataggtaatcttgcacgtcgcatccccggttcattttctgcgtttccatcttgcacttcaatagcatatctttgttcgcttgcctgtaacttacacgcgcctcgtatcttttaatgatggaataatttgggaatttactctgtgtttatttatttttatgttttgtatttggattttagaaagtaaataaagaaggtagaagagttacggaatgaagaaaaaaaaataaacaaaggtttaaaaaatttcaacaaaaagcgtactttacatatatatttattagacaagaaaagcagattaaatagatatacattcgattaacgataagtaaaatgtaaaatcacaggattttcgtgtgtggtcttctacacagacaagatgaaacaattcggcattaatacctgagagcaggaagagcaagataaaaggtagtatttgttggcgatccccctagagtcttttacatcttcggaaaacaaaaactattttttctttaatttctttttttactttctatttttaatttatatatttatattaaaaaatttaaattataattatttttatagcacgtgatgaaaaggaccgggaagctccaccccggttgataatcagaaaagccccaaaaacaggaagattgtataagcaaatatttaaattgtaaacgttaatattttgttaaaattcgcgttaaatttttgttaaatcagctcattttttaacgaatagcccgaaatcggcaaaatcccttataaatcaaaagaatagaccgagatagggttgagtgttgttccagtttccaacaagagtccactattaaagaacgtggactccaacgtcaaagggcgaaaaagggtctatcagggcgatggcccactacgtgaaccatcaccctaatcaagttttttggggtcgaggtgccgtaaagcagtaaatcggaagggtaaacggatgcccccatttagagcttgacggggaaagccggcgaacgtggcgagaaaggaagggaagaaagcgaaaggagcgggggctagggcggtgggaagtgtaggggtcacgctgggcgtaaccaccacacccgccgcgcttaatggggcgctacagggcgcgtggggatgatccactagtacggattagaagccgccgagcgggtgacagccctccgaaggaagactctcctccgtgcgtcctcgtcttcaccggtcgcgttcctgaaacgcagatgtgcctcgcgccgcactgctccgaacaataaagattctacaatactagcttttatggttatgaagaggaaaaattggcagtaacctggccccacaaaccttcaaatgaacgaatcaaattaacaaccataggatgataatgcgattagttttttagccttatttctggggtaattaatcagcgaagcgatgatttttgatctattaacagatatataaatgcaaaaactgcataaccactttaactaatactttcaacattttcggtttgtattacttcttattcaaatgtaataaaagtatcaacaaaaaattgttaatatacctctatactttaacgtcaaggagaaaaaaccccggatcggactactagcagctgtaatacgactcactatagggaatattaagcttaaacaatgaggcaggtttggttctcttggattgtgggattgttcctatgttttttcaacgtgtcttctgctgctccagtcaacactacaacagaagatgaaacggcacaaattccggctgaagctgtcatcggttactcagatttagaaggggatttcgatgttgctgttttgccattttccaacagcacaaataacgggttattgtttataaatactactattgccagcattgctgctaaagaagaaggggtatctctcgagaaaagagaggctgaagctatgccaggggaaaacttcttgaagtgcttctcccaatatatcccaaacaacgctactaacgggaagttagtttacactcaaaacaatccattatacatgtctgtcttaaactctactattcataacttaagatttacttccgatcggacccctaagccattggttatcgtcaccccatctcacgtctcccatatccaaggtactatcttatgttctaagaaggttggtttgcaaatccgtactagatctggtggtcacgactctgaaggtatgtcctatatctctcaagtcccatttgtcattgttgacttaagaaatatgagatccattaaaattgatgttcattctcaaactgcttgggtcgaagctggtgccaccttgggtgaagtttactactgggtcaacgaaaaaaacgaaaacttatctttagctgccggttactgtccaaccgtctgtgctggtggtcatttcggtggtggtggttacggtccattgatgcgtaactacggtttagctgctgacaacattattgacgctcatttagttaatgttcacggtaaggttttggacagaaaatctatgggtgaagatttattttgggccttgagaggtggtggtgctgaatccttcggtatcatcgttgcctggaagattcgtttagttgctgtcccttctaagtccaccatgttctccgtcaagaaaatcatggaaattcatgagttggtcaaattggttaacaagtggcaaaacatcgcttacaagtatgacaaggatttgttgttaatgactcacttcatcacccgtaatatcaccgacaaccaaggtaagaacaaaactgctattcacacctacttctcctccgtttttttgggtggtgtcgactccttagtcgatttgatgaacaaatcctttccagaattgggtattaagaaaactgattgtagacaattgtcttggattgacaccattatcttctattctggtgtcgttaactacgacaccgacaactttaacaaggaaattttgttggatcgttctgctggtcaaaatggtgccttcaaaatcaaattggactacgtcaaaaagccaatcccagaatctgttttcgttcaaattttggaaaagttgtacgaagaagacattggtgccggtatgtatgctttgtatccatatggtggtatcatggacgaaatttccgaatctgccatcccattcccacacagagctggtattttatatgaattgtggtacatctgttcttgggaaaagcaagaagacaacgaaaagcatttaaactggattagaaacatttacaacttcatgaccccatacgtttctaagaacccaagattagcctatttgaactaccgtgacttagatattggtattaatgacccaaagaacccaaacaactatactcaagccagaatttggggtgaaaagtacttcggtaagaacttcgatagattagttaaggttaaaactttggtcgatccaaacaacttcttcagaaacgaacaatccatcccaccattgccaagacatcgtcacggccatcatcaccatcaccattagctcgagcatgcatctagagggccgcatcatgtaattagttatgtcacgcttacattcacgccctccccccacatccgctctaaccgaaaaggaaggagttagacaacctgaagtctaggtccctatttatttttttatagttatgttagtattaagaacgttatttatatttcaaatttttcttttttttctgtacagacgcgtgtacgcatgtaacattatactgaaaaccttgcttgagaaggttttgggacgctcgaaggctttaatttgcggccctgcattaatgaatcggccaacgcgcggggagaggcggtttgcgtattgggcgctcttccgcttcctcgctcactgactcgctgcgctcggtcgttcggctgcggcgagcggtatcagctcactcaaaggcggtaatacggttatccacagaatcaggggataacgcaggaaagaacatgtgagcaaaaggccagcaaaagcccaggaaccgtaaaaaggccgcgttgctggcgtttttccataggctccgcccccctgacgagcatcacaaaaatcgacgctcaagtcagaggtggcgaaacccgacaggactataaagataccaggcgtttccccctggaagctccctcgtgcgctctcctgttccgaccctgccgcttaccggatacctgtccgcctttctcccttcgggaagcgtggcgctttctcatagctcacgctgtaggtatctcagttcggtgtaggtcgttcgctccaagctgggctgtgtgcacgaaccccccgttcagcccgaccgctgcgccttatccggtaactatcgtcttgagtccaacccggtaagacacgacttatcgccactggcagcagccactggtaacaggattagcagagcgaggtatgtaggcggtgctacagagttcttgaagtggtggcctaactacggctacactagaagaacagtatttggtatctgcgctctgctgaagccagttaccttcggaaaaagagttggtagctcttgatccggcaaacaaaccaccgctggtagcggtggtttttttgtttgcaagcagcagattacgcgcagaaaaaaaggatctcaagaagatcctttgatcttttctacggggtctgacgctcagtggaacgaaaactcacgttaagggattttggtcatgagattatcaaaaaggatcttcacctagatccttttaaattaaaaatgaagttttaaatcaatctaaagtatatatgagtaaacttggtctgacagttaccaatgcttaatcagtgaggcacctatctcagcgatctgtctatttcgttcatccatagttgcctgactccccgtcgtgtagataactacgatacgggagcgcttaccatctggccccagtgctgcaatgataccgcgagacccacgctcaccggctccagatttatcagcaataaaccagccagccggaagggccgagcgcagaagtggtcctgcaactttatccgcctccattcagtctattaattgttgccgggaagctagagtaagtagttcgccagttaatagtttgcgcaacgttgttggcattgctacaggcatcgtggtgtcactctcgtcgtttggtatggcttcattcagctccggttcccaacgatcaaggcgagttacatgatcccccatgttgtgcaaaaaagcggttagctccttcggtcctccgatcgttgtcagaagtaagttggccgcagtgttatcactcatggttatggcagcactgcataattctcttactgtcatgccatccgtaagatgcttttctgtgactggtgagtactcaaccaagtcattctgagaatagtgtatgcggcgaccgagttgctcttgcccggcgtcaatacgggataatagtgtatcacatagcagaactttaaaagtgctcatcattggaaaacgttcttcggggcgaaaactctcaaggatcttaccgctgttgagatccagttcgatgtaacccactcgtgcacccaactgatcttcagcatcttttactttcaccagcgtttctgggtgagcaaaaacaggaaggcaaaatgccgcaaaaaagggaataagggcgacacggaaatgttgaatactcatactcttcctttttcaatgggtaataactgatataattaaattgaagctctaatttgtgagtttagtatacatgcatttacttataatacagttttttagttttgctggccgcatcttctcaaatatgcttcccagcctgcttttctgtaacgttcaccctctaccttagcatcccttccctttgcaaatagtcctcttccaacaataataatgtcagatcctgtagagaccacatcatccacggttctatactgttgacccaatgcgtctcccttgtcatctaaacccacaccgggtgtcataatcaaccaatcgtaaccttcatctcttccacccatgtctctttgagcaataaagccgataacaaaatctttgtcgctcttcgcaatgtcaacagtacccttagtatattctccagtagatagggagcccttgcatgacaattctgctaacatcaaaaggcctctaggttcctttgttacttcttctgccgcctgcttcaaaccgctaacaatacctgggcccaccacaccgtgtgcattcgtaatgtctgcccattctgctattctgtatacacccgcagagtactgcaatttgactgtattaccaatgtcagcaaattttctgtcttcg

SEQ ID NO: 15 - DNA, 7266 bp, Artificial Sequence
  OXC154-R3T/T49R/S88A(=GCT)
aagagtaaaaaattgtacttggcggataatgcctttagcggcttaactgtgccctccatggaaaaatcagtcaagatatccacatgtgtttttagtaaacaaattttgggacctaatgcttcaactaactccagtaattccttggtggtacgaacatccaatgaagcacacaagtttgtttgcttttcgtgcatgatattaaatagcttggcagcaacaggactaggatgagtagcagcacgttccttatatgtagctttcgacatgatttatcttcgtttcctgcaggtttttgttctgtgcagttgggttaagaatactgggcaatttcatgtttcttcaacactacatatgcgtatatataccaatctaagtctgtgctccttccttcgttcttccttctgttcggagattaccgaatcaaaaaaatttcaaagaaaccgaaatcaaaaaaaagaataaaaaaaaaatgatgaattgaattgaaaagctagcttatcgatgataagctgtcaaagatgagaattaattccacggactatagactatactagatactccgtctactgtacgatacacttccgctcaggtccttgtcctttaacgaggccttaccactcttttgttactctattgatccagctcagcaaaggcagtgtgatctaagattctatcttcgcgatgtagtaaaactagctagaccgagaaagagactagaaatgcaaaaggcacttctacaatggctgccatcattattatccgatgtgacgctgcagcttctcaatgatattcgaatacgctttgaggagatacagcctaatatccgacaaactgttttacagatttacgatcgtacttgttacccatcattgaattttgaacatccgaacctgggagttttccctgaaacagatagtatatttgaacctgtataataatatatagtctagcgctttacggaagacaatgtatgtatttcggttcctggagaaactattgcatctattgcataggtaatcttgcacgtcgcatccccggttcattttctgcgtttccatcttgcacttcaatagcatatctttgttcgcttgcctgtaacttacacgcgcctcgtatcttttaatgatggaataatttgggaatttactctgtgtttatttatttttatgttttgtatttggattttagaaagtaaataaagaaggtagaagagttacggaatgaagaaaaaaaaataaacaaaggtttaaaaaatttcaacaaaaagcgtactttacatatatatttattagacaagaaaagcagattaaatagatatacattcgattaacgataagtaaaatgtaaaatcacaggattttcgtgtgtggtcttctacacagacaagatgaaacaattcggcattaatacctgagagcaggaagagcaagataaaaggtagtatttgttggcgatccccctagagtcttttacatcttcggaaaacaaaaactattttttctttaatttctttttttactttctatttttaatttatatatttatattaaaaaatttaaattataattatttttatagcacgtgatgaaaaggaccgggaagctccaccccggttgataatcagaaaagccccaaaaacaggaagattgtataagcaaatatttaaattgtaaacgttaatattttgttaaaattcgcgttaaatttttgttaaatcagctcattttttaacgaatagcccgaaatcggcaaaatcccttataaatcaaaagaatagaccgagatagggttgagtgttgttccagtttccaacaagagtccactattaaagaacgtggactccaacgtcaaagggcgaaaaagggtctatcagggcgatggcccactacgtgaaccatcaccctaatcaagttttttggggtcgaggtgccgtaaagcagtaaatcggaagggtaaacggatgcccccatttagagcttgacggggaaagccggcgaacgtggcgagaaaggaagggaagaaagcgaaaggagcgggggctagggcggtgggaagtgtaggggtcacgctgggcgtaaccaccacacccgccgcgcttaatggggcgctacagggcgcgtggggatgatccactagtacggattagaagccgccgagcgggtgacagccctccgaaggaagactctcctccgtgcgtcctcgtcttcaccggtcgcgttcctgaaacgcagatgtgcctcgcgccgcactgctccgaacaataaagattctacaatactagcttttatggttatgaagaggaaaaattggcagtaacctggccccacaaaccttcaaatgaacgaatcaaattaacaaccataggatgataatgcgattagttttttagccttatttctggggtaattaatcagcgaagcgatgatttttgatctattaacagatatataaatgcaaaaactgcataaccactttaactaatactttcaacattttcggtttgtattacttcttattcaaatgtaataaaagtatcaacaaaaaattgttaatatacctctatactttaacgtcaaggagaaaaaaccccggatcggactactagcagctgtaatacgactcactatagggaatattaagcttaaacaatgaggcaggtttggttctcttggattgtgggattgttcctatgttttttcaacgtgtcttctgctgctccagtcaacactacaacagaagatgaaacggcacaaattccggctgaagctgtcatcggttactcagatttagaaggggatttcgatgttgctgttttgccattttccaacagcacaaataacgggttattgtttataaatactactattgccagcattgctgctaaagaagaaggggtatctctcgagaaaagagaggctgaagctatgccaacggaaaacttcttgaagtgcttctcccaatatatcccaaacaacgctactaacttaaagttagtttacactcaaaacaatccattatacatgtctgtcttaaactctactattcataacttaagatttacttccgatcggacccctaagccattggttatcgtcaccccatctcacgtctcccatatccaaggtactatcttatgttctaagaaggttggtttgcaaatccgtactagatctggtggtcacgacgctgaaggtatgtcctatatctctcaagtcccatttgtcattgttgacttaagaaatatgagatccattaaaattgatgttcattctcaaactgcttgggtcgaagctggtgccaccttgggtgaagtttactactgggtcaacgaaaaaaacgaaaacttatctttagctgccggttactgtccaaccgtctgtgctggtggtcatttcggtggtggtggttacggtccattgatgcgtaactacggtttagctgctgacaacattattgacgctcatttagttaatgttcacggtaaggttttggacagaaaatctatgggtgaagatttattttgggccttgagaggtggtggtgctgaatccttcggtatcatcgttgcctggaagattcgtttagttgctgtcccttctaagtccaccatgttctccgtcaagaaaatcatggaaattcatgagttggtcaaattggttaacaagtggcaaaacatcgcttacaagtatgacaaggatttgttgttaatgactcacttcatcacccgtaatatcaccgacaaccaaggtaagaacaaaactgctattcacacctacttctcctccgtttttttgggtggtgtcgactccttagtcgatttgatgaacaaatcctttccagaattgggtattaagaaaactgattgtagacaattgtcttggattgacaccattatcttctattctggtgtcgttaactacgacaccgacaactttaacaaggaaattttgttggatcgttctgctggtcaaaatggtgccttcaaaatcaaattggactacgtcaaaaagccaatcccagaatctgttttcgttcaaattttggaaaagttgtacgaagaagacattggtgccggtatgtatgctttgtatccatatggtggtatcatggacgaaatttccgaatctgccatcccattcccacacagagctggtattttatatgaattgtggtacatctgttcttgggaaaagcaagaagacaacgaaaagcatttaaactggattagaaacatttacaacttcatgaccccatacgtttctaagaacccaagattagcctatttgaactaccgtgacttagatattggtattaatgacccaaagaacccaaacaactatactcaagccagaatttggggtgaaaagtacttcggtaagaacttcgatagattagttaaggttaaaactttggtcgatccaaacaacttcttcagaaacgaacaatccatcccaccattgccaagacatcgtcacggccatcatcaccatcaccattagctcgagcatgcatctagagggccgcatcatgtaattagttatgtcacgcttacattcacgccctccccccacatccgctctaaccgaaaaggaaggagttagacaacctgaagtctaggtccctatttatttttttatagttatgttagtattaagaacgttatttatatttcaaatttttcttttttttctgtacagacgcgtgtacgcatgtaacattatactgaaaaccttgcttgagaaggttttgggacgctcgaaggctttaatttgcggccctgcattaatgaatcggccaacgcgcggggagaggcggtttgcgtattgggcgctcttccgcttcctcgctcactgactcgctgcgctcggtcgttcggctgcggcgagcggtatcagctcactcaaaggcggtaatacggttatccacagaatcaggggataacgcaggaaagaacatgtgagcaaaaggccagcaaaagcccaggaaccgtaaaaaggccgcgttgctggcgtttttccataggctccgcccccctgacgagcatcacaaaaatcgacgctcaagtcagaggtggcgaaacccgacaggactataaagataccaggcgtttccccctggaagctccctcgtgcgctctcctgttccgaccctgccgcttaccggatacctgtccgcctttctcccttcgggaagcgtggcgctttctcatagctcacgctgtaggtatctcagttcggtgtaggtcgttcgctccaagctgggctgtgtgcacgaaccccccgttcagcccgaccgctgcgccttatccggtaactatcgtcttgagtccaacccggtaagacacgacttatcgccactggcagcagccactggtaacaggattagcagagcgaggtatgtaggcggtgctacagagttcttgaagtggtggcctaactacggctacactagaagaacagtatttggtatctgcgctctgctgaagccagttaccttcggaaaaagagttggtagctcttgatccggcaaacaaaccaccgctggtagcggtggtttttttgtttgcaagcagcagattacgcgcagaaaaaaaggatctcaagaagatcctttgatcttttctacggggtctgacgctcagtggaacgaaaactcacgttaagggattttggtcatgagattatcaaaaaggatcttcacctagatccttttaaattaaaaatgaagttttaaatcaatctaaagtatatatgagtaaacttggtctgacagttaccaatgcttaatcagtgaggcacctatctcagcgatctgtctatttcgttcatccatagttgcctgactccccgtcgtgtagataactacgatacgggagcgcttaccatctggccccagtgctgcaatgataccgcgagacccacgctcaccggctccagatttatcagcaataaaccagccagccggaagggccgagcgcagaagtggtcctgcaactttatccgcctccattcagtctattaattgttgccgggaagctagagtaagtagttcgccagttaatagtttgcgcaacgttgttggcattgctacaggcatcgtggtgtcactctcgtcgtttggtatggcttcattcagctccggttcccaacgatcaaggcgagttacatgatcccccatgttgtgcaaaaaagcggttagctccttcggtcctccgatcgttgtcagaagtaagttggccgcagtgttatcactcatggttatggcagcactgcataattctcttactgtcatgccatccgtaagatgcttttctgtgactggtgagtactcaaccaagtcattctgagaatagtgtatgcggcgaccgagttgctcttgcccggcgtcaatacgggataatagtgtatcacatagcagaactttaaaagtgctcatcattggaaaacgttcttcggggcgaaaactctcaaggatcttaccgctgttgagatccagttcgatgtaacccactcgtgcacccaactgatcttcagcatcttttactttcaccagcgtttctgggtgagcaaaaacaggaaggcaaaatgccgcaaaaaagggaataagggcgacacggaaatgttgaatactcatactcttcctttttcaatgggtaataactgatataattaaattgaagctctaatttgtgagtttagtatacatgcatttacttataatacagttttttagttttgctggccgcatcttctcaaatatgcttcccagcctgcttttctgtaacgttcaccctctaccttagcatcccttccctttgcaaatagtcctcttccaacaataataatgtcagatcctgtagagaccacatcatccacggttctatactgttgacccaatgcgtctcccttgtcatctaaacccacaccgggtgtcataatcaaccaatcgtaaccttcatctcttccacccatgtctctttgagcaataaagccgataacaaaatctttgtcgctcttcgcaatgtcaacagtacccttagtatattctccagtagatagggagcccttgcatgacaattctgctaacatcaaaaggcctctaggttcctttgttacttcttctgccgcctgcttcaaaccgctaacaatacctgggcccaccacaccgtgtgcattcgtaatgtctgcccattctgctattctgtatacacccgcagagtactgcaatttgactgtattaccaatgtcagcaaattttctgtcttcg

SEQ ID NO: 16 - DNA, 7266 bp, Artificial Sequence
  OXC154-R3G(=GGA)/A18E/T49R/S60T/S88A(=GCC)
aagagtaaaaaattgtacttggcggataatgcctttagcggcttaactgtgccctccatggaaaaatcagtcaagatatccacatgtgtttttagtaaacaaattttgggacctaatgcttcaactaactccagtaattccttggtggtacgaacatccaatgaagcacacaagtttgtttgcttttcgtgcatgatattaaatagcttggcagcaacaggactaggatgagtagcagcacgttccttatatgtagctttcgacatgatttatcttcgtttcctgcaggtttttgttctgtgcagttgggttaagaatactgggcaatttcatgtttcttcaacactacatatgcgtatatataccaatctaagtctgtgctccttccttcgttcttccttctgttcggagattaccgaatcaaaaaaatttcaaagaaaccgaaatcaaaaaaaagaataaaaaaaaaatgatgaattgaattgaaaagctagcttatcgatgataagctgtcaaagatgagaattaattccacggactatagactatactagatactccgtctactgtacgatacacttccgctcaggtccttgtcctttaacgaggccttaccactcttttgttactctattgatccagctcagcaaaggcagtgtgatctaagattctatcttcgcgatgtagtaaaactagctagaccgagaaagagactagaaatgcaaaaggcacttctacaatggctgccatcattattatccgatgtgacgctgcagcttctcaatgatattcgaatacgctttgaggagatacagcctaatatccgacaaactgttttacagatttacgatcgtacttgttacccatcattgaattttgaacatccgaacctgggagttttccctgaaacagatagtatatttgaacctgtataataatatatagtctagcgctttacggaagacaatgtatgtatttcggttcctggagaaactattgcatctattgcataggtaatcttgcacgtcgcatccccggttcattttctgcgtttccatcttgcacttcaatagcatatctttgttcgcttgcctgtaacttacacgcgcctcgtatcttttaatgatggaataatttgggaatttactctgtgtttatttatttttatgttttgtatttggattttagaaagtaaataaagaaggtagaagagttacggaatgaagaaaaaaaaataaacaaaggtttaaaaaatttcaacaaaaagcgtactttacatatatatttattagacaagaaaagcagattaaatagatatacattcgattaacgataagtaaaatgtaaaatcacaggattttcgtgtgtggtcttctacacagacaagatgaaacaattcggcattaatacctgagagcaggaagagcaagataaaaggtagtatttgttggcgatccccctagagtcttttacatcttcggaaaacaaaaactattttttctttaatttctttttttactttctatttttaatttatatatttatattaaaaaatttaaattataattatttttatagcacgtgatgaaaaggaccgggaagctccaccccggttgataatcagaaaagccccaaaaacaggaagattgtataagcaaatatttaaattgtaaacgttaatattttgttaaaattcgcgttaaatttttgttaaatcagctcattttttaacgaatagcccgaaatcggcaaaatcccttataaatcaaaagaatagaccgagatagggttgagtgttgttccagtttccaacaagagtccactattaaagaacgtggactccaacgtcaaagggcgaaaaagggtctatcagggcgatggcccactacgtgaaccatcaccctaatcaagttttttggggtcgaggtgccgtaaagcagtaaatcggaagggtaaacggatgcccccatttagagcttgacggggaaagccggcgaacgtggcgagaaaggaagggaagaaagcgaaaggagcgggggctagggcggtgggaagtgtaggggtcacgctgggcgtaaccaccacacccgccgcgcttaatggggcgctacagggcgcgtggggatgatccactagtacggattagaagccgccgagcgggtgacagccctccgaaggaagactctcctccgtgcgtcctcgtcttcaccggtcgcgttcctgaaacgcagatgtgcctcgcgccgcactgctccgaacaataaagattctacaatactagcttttatggttatgaagaggaaaaattggcagtaacctggccccacaaaccttcaaatgaacgaatcaaattaacaaccataggatgataatgcgattagttttttagccttatttctggggtaattaatcagcgaagcgatgatttttgatctattaacagatatataaatgcaaaaactgcataaccactttaactaatactttcaacattttcggtttgtattacttcttattcaaatgtaataaaagtatcaacaaaaaattgttaatatacctctatactttaacgtcaaggagaaaaaaccccggatcggactactagcagctgtaatacgactcactatagggaatattaagcttaaacaatgaggcaggtttggttctcttggattgtgggattgttcctatgttttttcaacgtgtcttctgctgctccagtcaacactacaacagaagatgaaacggcacaaattccggctgaagctgtcatcggttactcagatttagaaggggatttcgatgttgctgttttgccattttccaacagcacaaataacgggttattgtttataaatactactattgccagcattgctgctaaagaagaaggggtatctctcgagaaaagagaggctgaagctatgccaggagaaaacttcttgaagtgcttctcccaatatatcccaaacaacgagactaacttaaagttagtttacactcaaaacaatccattatacatgtctgtcttaaactctactattcataacttaagatttacttccgatcggacccctaagccattggttatcgtcaccccaacgcacgtctcccatatccaaggtactatcttatgttctaagaaggttggtttgcaaatccgtactagatctggtggtcacgacgccgaaggtatgtcctatatctctcaagtcccatttgtcattgttgacttaagaaatatgagatccattaaaattgatgttcattctcaaactgcttgggtcgaagctggtgccaccttgggtgaagtttactactgggtcaacgaaaaaaacgaaaacttatctttagctgccggttactgtccaaccgtctgtgctggtggtcatttcggtggtggtggttacggtccattgatgcgtaactacggtttagctgctgacaacattattgacgctcatttagttaatgttcacggtaaggttttggacagaaaatctatgggtgaagatttattttgggccttgagaggtggtggtgctgaatccttcggtatcatcgttgcctggaagattcgtttagttgctgtcccttctaagtccaccatgttctccgtcaagaaaatcatggaaattcatgagttggtcaaattggttaacaagtggcaaaacatcgcttacaagtatgacaaggatttgttgttaatgactcacttcatcacccgtaatatcaccgacaaccaaggtaagaacaaaactgctattcacacctacttctcctccgtttttttgggtggtgtcgactccttagtcgatttgatgaacaaatcctttccagaattgggtattaagaaaactgattgtagacaattgtcttggattgacaccattatcttctattctggtgtcgttaactacgacaccgacaactttaacaaggaaattttgttggatcgttctgctggtcaaaatggtgccttcaaaatcaaattggactacgtcaaaaagccaatcccagaatctgttttcgttcaaattttggaaaagttgtacgaagaagacattggtgccggtatgtatgctttgtatccatatggtggtatcatggacgaaatttccgaatctgccatcccattcccacacagagctggtattttatatgaattgtggtacatctgttcttgggaaaagcaagaagacaacgaaaagcatttaaactggattagaaacatttacaacttcatgaccccatacgtttctaagaacccaagattagcctatttgaactaccgtgacttagatattggtattaatgacccaaagaacccaaacaactatactcaagccagaatttggggtgaaaagtacttcggtaagaacttcgatagattagttaaggttaaaactttggtcgatccaaacaacttcttcagaaacgaacaatccatcccaccattgccaagacatcgtcacggccatcatcaccatcaccattagctcgagcatgcatctagagggccgcatcatgtaattagttatgtcacgcttacattcacgccctccccccacatccgctctaaccgaaaaggaaggagttagacaacctgaagtctaggtccctatttatttttttatagttatgttagtattaagaacgttatttatatttcaaatttttcttttttttctgtacagacgcgtgtacgcatgtaacattatactgaaaaccttgcttgagaaggttttgggacgctcgaaggctttaatttgcggccctgcattaatgaatcggccaacgcgcggggagaggcggtttgcgtattgggcgctcttccgcttcctcgctcactgactcgctgcgctcggtcgttcggctgcggcgagcggtatcagctcactcaaaggcggtaatacggttatccacagaatcaggggataacgcaggaaagaacatgtgagcaaaaggccagcaaaagcccaggaaccgtaaaaaggccgcgttgctggcgtttttccataggctccgcccccctgacgagcatcacaaaaatcgacgctcaagtcagaggtggcgaaacccgacaggactataaagataccaggcgtttccccctggaagctccctcgtgcgctctcctgttccgaccctgccgcttaccggatacctgtccgcctttctcccttcgggaagcgtggcgctttctcatagctcacgctgtaggtatctcagttcggtgtaggtcgttcgctccaagctgggctgtgtgcacgaaccccccgttcagcccgaccgctgcgccttatccggtaactatcgtcttgagtccaacccggtaagacacgacttatcgccactggcagcagccactggtaacaggattagcagagcgaggtatgtaggcggtgctacagagttcttgaagtggtggcctaactacggctacactagaagaacagtatttggtatctgcgctctgctgaagccagttaccttcggaaaaagagttggtagctcttgatccggcaaacaaaccaccgctggtagcggtggtttttttgtttgcaagcagcagattacgcgcagaaaaaaaggatctcaagaagatcctttgatcttttctacggggtctgacgctcagtggaacgaaaactcacgttaagggattttggtcatgagattatcaaaaaggatcttcacctagatccttttaaattaaaaatgaagttttaaatcaatctaaagtatatatgagtaaacttggtctgacagttaccaatgcttaatcagtgaggcacctatctcagcgatctgtctatttcgttcatccatagttgcctgactccccgtcgtgtagataactacgatacgggagcgcttaccatctggccccagtgctgcaatgataccgcgagacccacgctcaccggctccagatttatcagcaataaaccagccagccggaagggccgagcgcagaagtggtcctgcaactttatccgcctccattcagtctattaattgttgccgggaagctagagtaagtagttcgccagttaatagtttgcgcaacgttgttggcattgctacaggcatcgtggtgtcactctcgtcgtttggtatggcttcattcagctccggttcccaacgatcaaggcgagttacatgatcccccatgttgtgcaaaaaagcggttagctccttcggtcctccgatcgttgtcagaagtaagttggccgcagtgttatcactcatggttatggcagcactgcataattctcttactgtcatgccatccgtaagatgcttttctgtgactggtgagtactcaaccaagtcattctgagaatagtgtatgcggcgaccgagttgctcttgcccggcgtcaatacgggataatagtgtatcacatagcagaactttaaaagtgctcatcattggaaaacgttcttcggggcgaaaactctcaaggatcttaccgctgttgagatccagttcgatgtaacccactcgtgcacccaactgatcttcagcatcttttactttcaccagcgtttctgggtgagcaaaaacaggaaggcaaaatgccgcaaaaaagggaataagggcgacacggaaatgttgaatactcatactcttcctttttcaatgggtaataactgatataattaaattgaagctctaatttgtgagtttagtatacatgcatttacttataatacagttttttagttttgctggccgcatcttctcaaatatgcttcccagcctgcttttctgtaacgttcaccctctaccttagcatcccttccctttgcaaatagtcctcttccaacaataataatgtcagatcctgtagagaccacatcatccacggttctatactgttgacccaatgcgtctcccttgtcatctaaacccacaccgggtgtcataatcaaccaatcgtaaccttcatctcttccacccatgtctctttgagcaataaagccgataacaaaatctttgtcgctcttcgcaatgtcaacagtacccttagtatattctccagtagatagggagcccttgcatgacaattctgctaacatcaaaaggcctctaggttcctttgttacttcttctgccgcctgcttcaaaccgctaacaatacctgggcccaccacaccgtgtgcattcgtaatgtctgcccattctgctattctgtatacacccgcagagtactgcaatttgactgtattaccaatgtcagcaaattttctgtcttcg

SEQ ID NO: 17 - DNA, 7266 bp, Artificial Sequence
  OXC154-R3W/T49R/S88A(=GCC)/V97E
aagagtaaaaaattgtacttggcggataatgcctttagcggcttaactgtgccctccatggaaaaatcagtcaagatatccacatgtgtttttagtaaacaaattttgggacctaatgcttcaactaactccagtaattccttggtggtacgaacatccaatgaagcacacaagtttgtttgcttttcgtgcatgatattaaatagcttggcagcaacaggactaggatgagtagcagcacgttccttatatgtagctttcgacatgatttatcttcgtttcctgcaggtttttgttctgtgcagttgggttaagaatactgggcaatttcatgtttcttcaacactacatatgcgtatatataccaatctaagtctgtgctccttccttcgttcttccttctgttcggagattaccgaatcaaaaaaatttcaaagaaaccgaaatcaaaaaaaagaataaaaaaaaaatgatgaattgaattgaaaagctagcttatcgatgataagctgtcaaagatgagaattaattccacggactatagactatactagatactccgtctactgtacgatacacttccgctcaggtccttgtcctttaacgaggccttaccactcttttgttactctattgatccagctcagcaaaggcagtgtgatctaagattctatcttcgcgatgtagtaaaactagctagaccgagaaagagactagaaatgcaaaaggcacttctacaatggctgccatcattattatccgatgtgacgctgcagcttctcaatgatattcgaatacgctttgaggagatacagcctaatatccgacaaactgttttacagatttacgatcgtacttgttacccatcattgaattttgaacatccgaacctgggagttttccctgaaacagatagtatatttgaacctgtataataatatatagtctagcgctttacggaagacaatgtatgtatttcggttcctggagaaactattgcatctattgcataggtaatcttgcacgtcgcatccccggttcattttctgcgtttccatcttgcacttcaatagcatatctttgttcgcttgcctgtaacttacacgcgcctcgtatcttttaatgatggaataatttgggaatttactctgtgtttatttatttttatgttttgtatttggattttagaaagtaaataaagaaggtagaagagttacggaatgaagaaaaaaaaataaacaaaggtttaaaaaatttcaacaaaaagcgtactttacatatatatttattagacaagaaaagcagattaaatagatatacattcgattaacgataagtaaaatgtaaaatcacaggattttcgtgtgtggtcttctacacagacaagatgaaacaattcggcattaatacctgagagcaggaagagcaagataaaaggtagtatttgttggcgatccccctagagtcttttacatcttcggaaaacaaaaactattttttctttaatttctttttttactttctatttttaatttatatatttatattaaaaaatttaaattataattatttttatagcacgtgatgaaaaggaccgggaagctccaccccggttgataatcagaaaagccccaaaaacaggaagattgtataagcaaatatttaaattgtaaacgttaatattttgttaaaattcgcgttaaatttttgttaaatcagctcattttttaacgaatagcccgaaatcggcaaaatcccttataaatcaaaagaatagaccgagatagggttgagtgttgttccagtttccaacaagagtccactattaaagaacgtggactccaacgtcaaagggcgaaaaagggtctatcagggcgatggcccactacgtgaaccatcaccctaatcaagttttttggggtcgaggtgccgtaaagcagtaaatcggaagggtaaacggatgcccccatttagagcttgacggggaaagccggcgaacgtggcgagaaaggaagggaagaaagcgaaaggagcgggggctagggcggtgggaagtgtaggggtcacgctgggcgtaaccaccacacccgccgcgcttaatggggcgctacagggcgcgtggggatgatccactagtacggattagaagccgccgagcgggtgacagccctccgaaggaagactctcctccgtgcgtcctcgtcttcaccggtcgcgttcctgaaacgcagatgtgcctcgcgccgcactgctccgaacaataaagattctacaatactagcttttatggttatgaagaggaaaaattggcagtaacctggccccacaaaccttcaaatgaacgaatcaaattaacaaccataggatgataatgcgattagttttttagccttatttctggggtaattaatcagcgaagcgatgatttttgatctattaacagatatataaatgcaaaaactgcataaccactttaactaatactttcaacattttcggtttgtattacttcttattcaaatgtaataaaagtatcaacaaaaaattgttaatatacctctatactttaacgtcaaggagaaaaaaccccggatcggactactagcagctgtaatacgactcactatagggaatattaagcttaaacaatgaggcaggtttggttctcttggattgtgggattgttcctatgttttttcaacgtgtcttctgctgctccagtcaacactacaacagaagatgaaacggcacaaattccggctgaagctgtcatcggttactcagatttagaaggggatttcgatgttgctgttttgccattttccaacagcacaaataacgggttattgtttataaatactactattgccagcattgctgctaaagaagaaggggtatctctcgagaaaagagaggctgaagctatgccatgggaaaacttcttgaagtgcttctcccaatatatcccaaacaacgctactaacttaaagttagtttacactcaaaacaatccattatacatgtctgtcttaaactctactattcataacttaagatttacttccgatcggacccctaagccattggttatcgtcaccccatctcacgtctcccatatccaaggtactatcttatgttctaagaaggttggtttgcaaatccgtactagatctggtggtcacgacgccgaaggtatgtcctatatctctcaagagccatttgtcattgttgacttaagaaatatgagatccattaaaattgatgttcattctcaaactgcttgggtcgaagctggtgccaccttgggtgaagtttactactgggtcaacgaaaaaaacgaaaacttatctttagctgccggttactgtccaaccgtctgtgctggtggtcatttcggtggtggtggttacggtccattgatgcgtaactacggtttagctgctgacaacattattgacgctcatttagttaatgttcacggtaaggttttggacagaaaatctatgggtgaagatttattttgggccttgagaggtggtggtgctgaatccttcggtatcatcgttgcctggaagattcgtttagttgctgtcccttctaagtccaccatgttctccgtcaagaaaatcatggaaattcatgagttggtcaaattggttaacaagtggcaaaacatcgcttacaagtatgacaaggatttgttgttaatgactcacttcatcacccgtaatatcaccgacaaccaaggtaagaacaaaactgctattcacacctacttctcctccgtttttttgggtggtgtcgactccttagtcgatttgatgaacaaatcctttccagaattgggtattaagaaaactgattgtagacaattgtcttggattgacaccattatcttctattctggtgtcgttaactacgacaccgacaactttaacaaggaaattttgttggatcgttctgctggtcaaaatggtgccttcaaaatcaaattggactacgtcaaaaagccaatcccagaatctgttttcgttcaaattttggaaaagttgtacgaagaagacattggtgccggtatgtatgctttgtatccatatggtggtatcatggacgaaatttccgaatctgccatcccattcccacacagagctggtattttatatgaattgtggtacatctgttcttgggaaaagcaagaagacaacgaaaagcatttaaactggattagaaacatttacaacttcatgaccccatacgtttctaagaacccaagattagcctatttgaactaccgtgacttagatattggtattaatgacccaaagaacccaaacaactatactcaagccagaatttggggtgaaaagtacttcggtaagaacttcgatagattagttaaggttaaaactttggtcgatccaaacaacttcttcagaaacgaacaatccatcccaccattgccaagacatcgtcacggccatcatcaccatcaccattagctcgagcatgcatctagagggccgcatcatgtaattagttatgtcacgcttacattcacgccctccccccacatccgctctaaccgaaaaggaaggagttagacaacctgaagtctaggtccctatttatttttttatagttatgttagtattaagaacgttatttatatttcaaatttttcttttttttctgtacagacgcgtgtacgcatgtaacattatactgaaaaccttgcttgagaaggttttgggacgctcgaaggctttaatttgcggccctgcattaatgaatcggccaacgcgcggggagaggcggtttgcgtattgggcgctcttccgcttcctcgctcactgactcgctgcgctcggtcgttcggctgcggcgagcggtatcagctcactcaaaggcggtaatacggttatccacagaatcaggggataacgcaggaaagaacatgtgagcaaaaggccagcaaaagcccaggaaccgtaaaaaggccgcgttgctggcgtttttccataggctccgcccccctgacgagcatcacaaaaatcgacgctcaagtcagaggtggcgaaacccgacaggactataaagataccaggcgtttccccctggaagctccctcgtgcgctctcctgttccgaccctgccgcttaccggatacctgtccgcctttctcccttcgggaagcgtggcgctttctcatagctcacgctgtaggtatctcagttcggtgtaggtcgttcgctccaagctgggctgtgtgcacgaaccccccgttcagcccgaccgctgcgccttatccggtaactatcgtcttgagtccaacccggtaagacacgacttatcgccactggcagcagccactggtaacaggattagcagagcgaggtatgtaggcggtgctacagagttcttgaagtggtggcctaactacggctacactagaagaacagtatttggtatctgcgctctgctgaagccagttaccttcggaaaaagagttggtagctcttgatccggcaaacaaaccaccgctggtagcggtggtttttttgtttgcaagcagcagattacgcgcagaaaaaaaggatctcaagaagatcctttgatcttttctacggggtctgacgctcagtggaacgaaaactcacgttaagggattttggtcatgagattatcaaaaaggatcttcacctagatccttttaaattaaaaatgaagttttaaatcaatctaaagtatatatgagtaaacttggtctgacagttaccaatgcttaatcagtgaggcacctatctcagcgatctgtctatttcgttcatccatagttgcctgactccccgtcgtgtagataactacgatacgggagcgcttaccatctggccccagtgctgcaatgataccgcgagacccacgctcaccggctccagatttatcagcaataaaccagccagccggaagggccgagcgcagaagtggtcctgcaactttatccgcctccattcagtctattaattgttgccgggaagctagagtaagtagttcgccagttaatagtttgcgcaacgttgttggcattgctacaggcatcgtggtgtcactctcgtcgtttggtatggcttcattcagctccggttcccaacgatcaaggcgagttacatgatcccccatgttgtgcaaaaaagcggttagctccttcggtcctccgatcgttgtcagaagtaagttggccgcagtgttatcactcatggttatggcagcactgcataattctcttactgtcatgccatccgtaagatgcttttctgtgactggtgagtactcaaccaagtcattctgagaatagtgtatgcggcgaccgagttgctcttgcccggcgtcaatacgggataatagtgtatcacatagcagaactttaaaagtgctcatcattggaaaacgttcttcggggcgaaaactctcaaggatcttaccgctgttgagatccagttcgatgtaacccactcgtgcacccaactgatcttcagcatcttttactttcaccagcgtttctgggtgagcaaaaacaggaaggcaaaatgccgcaaaaaagggaataagggcgacacggaaatgttgaatactcatactcttcctttttcaatgggtaataactgatataattaaattgaagctctaatttgtgagtttagtatacatgcatttacttataatacagttttttagttttgctggccgcatcttctcaaatatgcttcccagcctgcttttctgtaacgttcaccctctaccttagcatcccttccctttgcaaatagtcctcttccaacaataataatgtcagatcctgtagagaccacatcatccacggttctatactgttgacccaatgcgtctcccttgtcatctaaacccacaccgggtgtcataatcaaccaatcgtaaccttcatctcttccacccatgtctctttgagcaataaagccgataacaaaatctttgtcgctcttcgcaatgtcaacagtacccttagtatattctccagtagatagggagcccttgcatgacaattctgctaacatcaaaaggcctctaggttcctttgttacttcttctgccgcctgcttcaaaccgctaacaatacctgggcccaccacaccgtgtgcattcgtaatgtctgcccattctgctattctgtatacacccgcagagtactgcaatttgactgtattaccaatgtcagcaaattttctgtcttcg

SEQ ID NO: 18 - DNA, 7266 bp, Artificial Sequence
  OXC154-R3G(=GGG)/A18E/S88A(=GCC)
aagagtaaaaaattgtacttggcggataatgcctttagcggcttaactgtgccctccatggaaaaatcagtcaagatatccacatgtgtttttagtaaacaaattttgggacctaatgcttcaactaactccagtaattccttggtggtacgaacatccaatgaagcacacaagtttgtttgcttttcgtgcatgatattaaatagcttggcagcaacaggactaggatgagtagcagcacgttccttatatgtagctttcgacatgatttatcttcgtttcctgcaggtttttgttctgtgcagttgggttaagaatactgggcaatttcatgtttcttcaacactacatatgcgtatatataccaatctaagtctgtgctccttccttcgttcttccttctgttcggagattaccgaatcaaaaaaatttcaaagaaaccgaaatcaaaaaaaagaataaaaaaaaaatgatgaattgaattgaaaagctagcttatcgatgataagctgtcaaagatgagaattaattccacggactatagactatactagatactccgtctactgtacgatacacttccgctcaggtccttgtcctttaacgaggccttaccactcttttgttactctattgatccagctcagcaaaggcagtgtgatctaagattctatcttcgcgatgtagtaaaactagctagaccgagaaagagactagaaatgcaaaaggcacttctacaatggctgccatcattattatccgatgtgacgctgcagcttctcaatgatattcgaatacgctttgaggagatacagcctaatatccgacaaactgttttacagatttacgatcgtacttgttacccatcattgaattttgaacatccgaacctgggagttttccctgaaacagatagtatatttgaacctgtataataatatatagtctagcgctttacggaagacaatgtatgtatttcggttcctggagaaactattgcatctattgcataggtaatcttgcacgtcgcatccccggttcattttctgcgtttccatcttgcacttcaatagcatatctttgttcgcttgcctgtaacttacacgcgcctcgtatcttttaatgatggaataatttgggaatttactctgtgtttatttatttttatgttttgtatttggattttagaaagtaaataaagaaggtagaagagttacggaatgaagaaaaaaaaataaacaaaggtttaaaaaatttcaacaaaaagcgtactttacatatatatttattagacaagaaaagcagattaaatagatatacattcgattaacgataagtaaaatgtaaaatcacaggattttcgtgtgtggtcttctacacagacaagatgaaacaattcggcattaatacctgagagcaggaagagcaagataaaaggtagtatttgttggcgatccccctagagtcttttacatcttcggaaaacaaaaactattttttctttaatttctttttttactttctatttttaatttatatatttatattaaaaaatttaaattataattatttttatagcacgtgatgaaaaggaccgggaagctccaccccggttgataatcagaaaagccccaaaaacaggaagattgtataagcaaatatttaaattgtaaacgttaatattttgttaaaattcgcgttaaatttttgttaaatcagctcattttttaacgaatagcccgaaatcggcaaaatcccttataaatcaaaagaatagaccgagatagggttgagtgttgttccagtttccaacaagagtccactattaaagaacgtggactccaacgtcaaagggcgaaaaagggtctatcagggcgatggcccactacgtgaaccatcaccctaatcaagttttttggggtcgaggtgccgtaaagcagtaaatcggaagggtaaacggatgcccccatttagagcttgacggggaaagccggcgaacgtggcgagaaaggaagggaagaaagcgaaaggagcgggggctagggcggtgggaagtgtaggggtcacgctgggcgtaaccaccacacccgccgcgcttaatggggcgctacagggcgcgtggggatgatccactagtacggattagaagccgccgagcgggtgacagccctccgaaggaagactctcctccgtgcgtcctcgtcttcaccggtcgcgttcctgaaacgcagatgtgcctcgcgccgcactgctccgaacaataaagattctacaatactagcttttatggttatgaagaggaaaaattggcagtaacctggccccacaaaccttcaaatgaacgaatcaaattaacaaccataggatgataatgcgattagttttttagccttatttctggggtaattaatcagcgaagcgatgatttttgatctattaacagatatataaatgcaaaaactgcataaccactttaactaatactttcaacattttcggtttgtattacttcttattcaaatgtaataaaagtatcaacaaaaaattgttaatatacctctatactttaacgtcaaggagaaaaaaccccggatcggactactagcagctgtaatacgactcactatagggaatattaagcttaaacaatgaggcaggtttggttctcttggattgtgggattgttcctatgttttttcaacgtgtcttctgctgctccagtcaacactacaacagaagatgaaacggcacaaattccggctgaagctgtcatcggttactcagatttagaaggggatttcgatgttgctgttttgccattttccaacagcacaaataacgggttattgtttataaatactactattgccagcattgctgctaaagaagaaggggtatctctcgagaaaagagaggctgaagctatgccaggggaaaacttcttgaagtgcttctcccaatatatcccaaacaacgagactaacttaaagttagtttacactcaaaacaatccattatacatgtctgtcttaaactctactattcataacttaagatttacttccgatactacccctaagccattggttatcgtcaccccatctcacgtctcccatatccaaggtactatcttatgttctaagaaggttggtttgcaaatccgtactagatctggtggtcacgacgccgaaggtatgtcctatatctctcaagtcccatttgtcattgttgacttaagaaatatgagatccattaaaattgatgttcattctcaaactgcttgggtcgaagctggtgccaccttgggtgaagtttactactgggtcaacgaaaaaaacgaaaacttatctttagctgccggttactgtccaaccgtctgtgctggtggtcatttcggtggtggtggttacggtccattgatgcgtaactacggtttagctgctgacaacattattgacgctcatttagttaatgttcacggtaaggttttggacagaaaatctatgggtgaagatttattttgggccttgagaggtggtggtgctgaatccttcggtatcatcgttgcctggaagattcgtttagttgctgtcccttctaagtccaccatgttctccgtcaagaaaatcatggaaattcatgagttggtcaaattggttaacaagtggcaaaacatcgcttacaagtatgacaaggatttgttgttaatgactcacttcatcacccgtaatatcaccgacaaccaaggtaagaacaaaactgctattcacacctacttctcctccgtttttttgggtggtgtcgactccttagtcgatttgatgaacaaatcctttccagaattgggtattaagaaaactgattgtagacaattgtcttggattgacaccattatcttctattctggtgtcgttaactacgacaccgacaactttaacaaggaaattttgttggatcgttctgctggtcaaaatggtgccttcaaaatcaaattggactacgtcaaaaagccaatcccagaatctgttttcgttcaaattttggaaaagttgtacgaagaagacattggtgccggtatgtatgctttgtatccatatggtggtatcatggacgaaatttccgaatctgccatcccattcccacacagagctggtattttatatgaattgtggtacatctgttcttgggaaaagcaagaagacaacgaaaagcatttaaactggattagaaacatttacaacttcatgaccccatacgtttctaagaacccaagattagcctatttgaactaccgtgacttagatattggtattaatgacccaaagaacccaaacaactatactcaagccagaatttggggtgaaaagtacttcggtaagaacttcgatagattagttaaggttaaaactttggtcgatccaaacaacttcttcagaaacgaacaatccatcccaccattgccaagacatcgtcacggccatcatcaccatcaccattagctcgagcatgcatctagagggccgcatcatgtaattagttatgtcacgcttacattcacgccctccccccacatccgctctaaccgaaaaggaaggagttagacaacctgaagtctaggtccctatttatttttttatagttatgttagtattaagaacgttatttatatttcaaatttttcttttttttctgtacagacgcgtgtacgcatgtaacattatactgaaaaccttgcttgagaaggttttgggacgctcgaaggctttaatttgcggccctgcattaatgaatcggccaacgcgcggggagaggcggtttgcgtattgggcgctcttccgcttcctcgctcactgactcgctgcgctcggtcgttcggctgcggcgagcggtatcagctcactcaaaggcggtaatacggttatccacagaatcaggggataacgcaggaaagaacatgtgagcaaaaggccagcaaaagcccaggaaccgtaaaaaggccgcgttgctggcgtttttccataggctccgcccccctgacgagcatcacaaaaatcgacgctcaagtcagaggtggcgaaacccgacaggactataaagataccaggcgtttccccctggaagctccctcgtgcgctctcctgttccgaccctgccgcttaccggatacctgtccgcctttctcccttcgggaagcgtggcgctttctcatagctcacgctgtaggtatctcagttcggtgtaggtcgttcgctccaagctgggctgtgtgcacgaaccccccgttcagcccgaccgctgcgccttatccggtaactatcgtcttgagtccaacccggtaagacacgacttatcgccactggcagcagccactggtaacaggattagcagagcgaggtatgtaggcggtgctacagagttcttgaagtggtggcctaactacggctacactagaagaacagtatttggtatctgcgctctgctgaagccagttaccttcggaaaaagagttggtagctcttgatccggcaaacaaaccaccgctggtagcggtggtttttttgtttgcaagcagcagattacgcgcagaaaaaaaggatctcaagaagatcctttgatcttttctacggggtctgacgctcagtggaacgaaaactcacgttaagggattttggtcatgagattatcaaaaaggatcttcacctagatccttttaaattaaaaatgaagttttaaatcaatctaaagtatatatgagtaaacttggtctgacagttaccaatgcttaatcagtgaggcacctatctcagcgatctgtctatttcgttcatccatagttgcctgactccccgtcgtgtagataactacgatacgggagcgcttaccatctggccccagtgctgcaatgataccgcgagacccacgctcaccggctccagatttatcagcaataaaccagccagccggaagggccgagcgcagaagtggtcctgcaactttatccgcctccattcagtctattaattgttgccgggaagctagagtaagtagttcgccagttaatagtttgcgcaacgttgttggcattgctacaggcatcgtggtgtcactctcgtcgtttggtatggcttcattcagctccggttcccaacgatcaaggcgagttacatgatcccccatgttgtgcaaaaaagcggttagctccttcggtcctccgatcgttgtcagaagtaagttggccgcagtgttatcactcatggttatggcagcactgcataattctcttactgtcatgccatccgtaagatgcttttctgtgactggtgagtactcaaccaagtcattctgagaatagtgtatgcggcgaccgagttgctcttgcccggcgtcaatacgggataatagtgtatcacatagcagaactttaaaagtgctcatcattggaaaacgttcttcggggcgaaaactctcaaggatcttaccgctgttgagatccagttcgatgtaacccactcgtgcacccaactgatcttcagcatcttttactttcaccagcgtttctgggtgagcaaaaacaggaaggcaaaatgccgcaaaaaagggaataagggcgacacggaaatgttgaatactcatactcttcctttttcaatgggtaataactgatataattaaattgaagctctaatttgtgagtttagtatacatgcatttacttataatacagttttttagttttgctggccgcatcttctcaaatatgcttcccagcctgcttttctgtaacgttcaccctctaccttagcatcccttccctttgcaaatagtcctcttccaacaataataatgtcagatcctgtagagaccacatcatccacggttctatactgttgacccaatgcgtctcccttgtcatctaaacccacaccgggtgtcataatcaaccaatcgtaaccttcatctcttccacccatgtctctttgagcaataaagccgataacaaaatctttgtcgctcttcgcaatgtcaacagtacccttagtatattctccagtagatagggagcccttgcatgacaattctgctaacatcaaaaggcctctaggttcctttgttacttcttctgccgcctgcttcaaaccgctaacaatacctgggcccaccacaccgtgtgcattcgtaatgtctgcccattctgctattctgtatacacccgcagagtactgcaatttgactgtattaccaatgtcagcaaattttctgtcttcg

SEQ ID NO: 19 - DNA, 7266 bp, Artificial Sequence
  OXC154-R3V/A18E/T49R/S60T/S88A(=GCC)
aagagtaaaaaattgtacttggcggataatgcctttagcggcttaactgtgccctccatggaaaaatcagtcaagatatccacatgtgtttttagtaaacaaattttgggacctaatgcttcaactaactccagtaattccttggtggtacgaacatccaatgaagcacacaagtttgtttgcttttcgtgcatgatattaaatagcttggcagcaacaggactaggatgagtagcagcacgttccttatatgtagctttcgacatgatttatcttcgtttcctgcaggtttttgttctgtgcagttgggttaagaatactgggcaatttcatgtttcttcaacactacatatgcgtatatataccaatctaagtctgtgctccttccttcgttcttccttctgttcggagattaccgaatcaaaaaaatttcaaagaaaccgaaatcaaaaaaaagaataaaaaaaaaatgatgaattgaattgaaaagctagcttatcgatgataagctgtcaaagatgagaattaattccacggactatagactatactagatactccgtctactgtacgatacacttccgctcaggtccttgtcctttaacgaggccttaccactcttttgttactctattgatccagctcagcaaaggcagtgtgatctaagattctatcttcgcgatgtagtaaaactagctagaccgagaaagagactagaaatgcaaaaggcacttctacaatggctgccatcattattatccgatgtgacgctgcagcttctcaatgatattcgaatacgctttgaggagatacagcctaatatccgacaaactgttttacagatttacgatcgtacttgttacccatcattgaattttgaacatccgaacctgggagttttccctgaaacagatagtatatttgaacctgtataataatatatagtctagcgctttacggaagacaatgtatgtatttcggttcctggagaaactattgcatctattgcataggtaatcttgcacgtcgcatccccggttcattttctgcgtttccatcttgcacttcaatagcatatctttgttcgcttgcctgtaacttacacgcgcctcgtatcttttaatgatggaataatttgggaatttactctgtgtttatttatttttatgttttgtatttggattttagaaagtaaataaagaaggtagaagagttacggaatgaagaaaaaaaaataaacaaaggtttaaaaaatttcaacaaaaagcgtactttacatatatatttattagacaagaaaagcagattaaatagatatacattcgattaacgataagtaaaatgtaaaatcacaggattttcgtgtgtggtcttctacacagacaagatgaaacaattcggcattaatacctgagagcaggaagagcaagataaaaggtagtatttgttggcgatccccctagagtcttttacatcttcggaaaacaaaaactattttttctttaatttctttttttactttctatttttaatttatatatttatattaaaaaatttaaattataattatttttatagcacgtgatgaaaaggaccgggaagctccaccccggttgataatcagaaaagccccaaaaacaggaagattgtataagcaaatatttaaattgtaaacgttaatattttgttaaaattcgcgttaaatttttgttaaatcagctcattttttaacgaatagcccgaaatcggcaaaatcccttataaatcaaaagaatagaccgagatagggttgagtgttgttccagtttccaacaagagtccactattaaagaacgtggactccaacgtcaaagggcgaaaaagggtctatcagggcgatggcccactacgtgaaccatcaccctaatcaagttttttggggtcgaggtgccgtaaagcagtaaatcggaagggtaaacggatgcccccatttagagcttgacggggaaagccggcgaacgtggcgagaaaggaagggaagaaagcgaaaggagcgggggctagggcggtgggaagtgtaggggtcacgctgggcgtaaccaccacacccgccgcgcttaatggggcgctacagggcgcgtggggatgatccactagtacggattagaagccgccgagcgggtgacagccctccgaaggaagactctcctccgtgcgtcctcgtcttcaccggtcgcgttcctgaaacgcagatgtgcctcgcgccgcactgctccgaacaataaagattctacaatactagcttttatggttatgaagaggaaaaattggcagtaacctggccccacaaaccttcaaatgaacgaatcaaattaacaaccataggatgataatgcgattagttttttagccttatttctggggtaattaatcagcgaagcgatgatttttgatctattaacagatatataaatgcaaaaactgcataaccactttaactaatactttcaacattttcggtttgtattacttcttattcaaatgtaataaaagtatcaacaaaaaattgttaatatacctctatactttaacgtcaaggagaaaaaaccccggatcggactactagcagctgtaatacgactcactatagggaatattaagcttaaacaatgaggcaggtttggttctcttggattgtgggattgttcctatgttttttcaacgtgtcttctgctgctccagtcaacactacaacagaagatgaaacggcacaaattccggctgaagctgtcatcggttactcagatttagaaggggatttcgatgttgctgttttgccattttccaacagcacaaataacgggttattgtttataaatactactattgccagcattgctgctaaagaagaaggggtatctctcgagaaaagagaggctgaagctatgccagtcgaaaacttcttgaagtgcttctcccaatatatcccaaacaacgagactaacttaaagttagtttacactcaaaacaatccattatacatgtctgtcttaaactctactattcataacttaagatttacttccgatcggacccctaagccattggttatcgtcaccccaacgcacgtctcccatatccaaggtactatcttatgttctaagaaggttggtttgcaaatccgtactagatctggtggtcacgacgccgaaggtatgtcctatatctctcaagtcccatttgtcattgttgacttaagaaatatgagatccattaaaattgatgttcattctcaaactgcttgggtcgaagctggtgccaccttgggtgaagtttactactgggtcaacgaaaaaaacgaaaacttatctttagctgccggttactgtccaaccgtctgtgctggtggtcatttcggtggtggtggttacggtccattgatgcgtaactacggtttagctgctgacaacattattgacgctcatttagttaatgttcacggtaaggttttggacagaaaatctatgggtgaagatttattttgggccttgagaggtggtggtgctgaatccttcggtatcatcgttgcctggaagattcgtttagttgctgtcccttctaagtccaccatgttctccgtcaagaaaatcatggaaattcatgagttggtcaaattggttaacaagtggcaaaacatcgcttacaagtatgacaaggatttgttgttaatgactcacttcatcacccgtaatatcaccgacaaccaaggtaagaacaaaactgctattcacacctacttctcctccgtttttttgggtggtgtcgactccttagtcgatttgatgaacaaatcctttccagaattgggtattaagaaaactgattgtagacaattgtcttggattgacaccattatcttctattctggtgtcgttaactacgacaccgacaactttaacaaggaaattttgttggatcgttctgctggtcaaaatggtgccttcaaaatcaaattggactacgtcaaaaagccaatcccagaatctgttttcgttcaaattttggaaaagttgtacgaagaagacattggtgccggtatgtatgctttgtatccatatggtggtatcatggacgaaatttccgaatctgccatcccattcccacacagagctggtattttatatgaattgtggtacatctgttcttgggaaaagcaagaagacaacgaaaagcatttaaactggattagaaacatttacaacttcatgaccccatacgtttctaagaacccaagattagcctatttgaactaccgtgacttagatattggtattaatgacccaaagaacccaaacaactatactcaagccagaatttggggtgaaaagtacttcggtaagaacttcgatagattagttaaggttaaaactttggtcgatccaaacaacttcttcagaaacgaacaatccatcccaccattgccaagacatcgtcacggccatcatcaccatcaccattagctcgagcatgcatctagagggccgcatcatgtaattagttatgtcacgcttacattcacgccctccccccacatccgctctaaccgaaaaggaaggagttagacaacctgaagtctaggtccctatttatttttttatagttatgttagtattaagaacgttatttatatttcaaatttttcttttttttctgtacagacgcgtgtacgcatgtaacattatactgaaaaccttgcttgagaaggttttgggacgctcgaaggctttaatttgcggccctgcattaatgaatcggccaacgcgcggggagaggcggtttgcgtattgggcgctcttccgcttcctcgctcactgactcgctgcgctcggtcgttcggctgcggcgagcggtatcagctcactcaaaggcggtaatacggttatccacagaatcaggggataacgcaggaaagaacatgtgagcaaaaggccagcaaaagcccaggaaccgtaaaaaggccgcgttgctggcgtttttccataggctccgcccccctgacgagcatcacaaaaatcgacgctcaagtcagaggtggcgaaacccgacaggactataaagataccaggcgtttccccctggaagctccctcgtgcgctctcctgttccgaccctgccgcttaccggatacctgtccgcctttctcccttcgggaagcgtggcgctttctcatagctcacgctgtaggtatctcagttcggtgtaggtcgttcgctccaagctgggctgtgtgcacgaaccccccgttcagcccgaccgctgcgccttatccggtaactatcgtcttgagtccaacccggtaagacacgacttatcgccactggcagcagccactggtaacaggattagcagagcgaggtatgtaggcggtgctacagagttcttgaagtggtggcctaactacggctacactagaagaacagtatttggtatctgcgctctgctgaagccagttaccttcggaaaaagagttggtagctcttgatccggcaaacaaaccaccgctggtagcggtggtttttttgtttgcaagcagcagattacgcgcagaaaaaaaggatctcaagaagatcctttgatcttttctacggggtctgacgctcagtggaacgaaaactcacgttaagggattttggtcatgagattatcaaaaaggatcttcacctagatccttttaaattaaaaatgaagttttaaatcaatctaaagtatatatgagtaaacttggtctgacagttaccaatgcttaatcagtgaggcacctatctcagcgatctgtctatttcgttcatccatagttgcctgactccccgtcgtgtagataactacgatacgggagcgcttaccatctggccccagtgctgcaatgataccgcgagacccacgctcaccggctccagatttatcagcaataaaccagccagccggaagggccgagcgcagaagtggtcctgcaactttatccgcctccattcagtctattaattgttgccgggaagctagagtaagtagttcgccagttaatagtttgcgcaacgttgttggcattgctacaggcatcgtggtgtcactctcgtcgtttggtatggcttcattcagctccggttcccaacgatcaaggcgagttacatgatcccccatgttgtgcaaaaaagcggttagctccttcggtcctccgatcgttgtcagaagtaagttggccgcagtgttatcactcatggttatggcagcactgcataattctcttactgtcatgccatccgtaagatgcttttctgtgactggtgagtactcaaccaagtcattctgagaatagtgtatgcggcgaccgagttgctcttgcccggcgtcaatacgggataatagtgtatcacatagcagaactttaaaagtgctcatcattggaaaacgttcttcggggcgaaaactctcaaggatcttaccgctgttgagatccagttcgatgtaacccactcgtgcacccaactgatcttcagcatcttttactttcaccagcgtttctgggtgagcaaaaacaggaaggcaaaatgccgcaaaaaagggaataagggcgacacggaaatgttgaatactcatactcttcctttttcaatgggtaataactgatataattaaattgaagctctaatttgtgagtttagtatacatgcatttacttataatacagttttttagttttgctggccgcatcttctcaaatatgcttcccagcctgcttttctgtaacgttcaccctctaccttagcatcccttccctttgcaaatagtcctcttccaacaataataatgtcagatcctgtagagaccacatcatccacggttctatactgttgacccaatgcgtctcccttgtcatctaaacccacaccgggtgtcataatcaaccaatcgtaaccttcatctcttccacccatgtctctttgagcaataaagccgataacaaaatctttgtcgctcttcgcaatgtcaacagtacccttagtatattctccagtagatagggagcccttgcatgacaattctgctaacatcaaaaggcctctaggttcctttgttacttcttctgccgcctgcttcaaaccgctaacaatacctgggcccaccacaccgtgtgcattcgtaatgtctgcccattctgctattctgtatacacccgcagagtactgcaatttgactgtattaccaatgtcagcaaattttctgtcttcg

SEQ ID NO: 20 - DNA, 7266 bp, Artificial Sequence
  OXC154-S60T/S88A(=GCC)
aagagtaaaaaattgtacttggcggataatgcctttagcggcttaactgtgccctccatggaaaaatcagtcaagatatccacatgtgtttttagtaaacaaattttgggacctaatgcttcaactaactccagtaattccttggtggtacgaacatccaatgaagcacacaagtttgtttgcttttcgtgcatgatattaaatagcttggcagcaacaggactaggatgagtagcagcacgttccttatatgtagctttcgacatgatttatcttcgtttcctgcaggtttttgttctgtgcagttgggttaagaatactgggcaatttcatgtttcttcaacactacatatgcgtatatataccaatctaagtctgtgctccttccttcgttcttccttctgttcggagattaccgaatcaaaaaaatttcaaagaaaccgaaatcaaaaaaaagaataaaaaaaaaatgatgaattgaattgaaaagctagcttatcgatgataagctgtcaaagatgagaattaattccacggactatagactatactagatactccgtctactgtacgatacacttccgctcaggtccttgtcctttaacgaggccttaccactcttttgttactctattgatccagctcagcaaaggcagtgtgatctaagattctatcttcgcgatgtagtaaaactagctagaccgagaaagagactagaaatgcaaaaggcacttctacaatggctgccatcattattatccgatgtgacgctgcagcttctcaatgatattcgaatacgctttgaggagatacagcctaatatccgacaaactgttttacagatttacgatcgtacttgttacccatcattgaattttgaacatccgaacctgggagttttccctgaaacagatagtatatttgaacctgtataataatatatagtctagcgctttacggaagacaatgtatgtatttcggttcctggagaaactattgcatctattgcataggtaatcttgcacgtcgcatccccggttcattttctgcgtttccatcttgcacttcaatagcatatctttgttcgcttgcctgtaacttacacgcgcctcgtatcttttaatgatggaataatttgggaatttactctgtgtttatttatttttatgttttgtatttggattttagaaagtaaataaagaaggtagaagagttacggaatgaagaaaaaaaaataaacaaaggtttaaaaaatttcaacaaaaagcgtactttacatatatatttattagacaagaaaagcagattaaatagatatacattcgattaacgataagtaaaatgtaaaatcacaggattttcgtgtgtggtcttctacacagacaagatgaaacaattcggcattaatacctgagagcaggaagagcaagataaaaggtagtatttgttggcgatccccctagagtcttttacatcttcggaaaacaaaaactattttttctttaatttctttttttactttctatttttaatttatatatttatattaaaaaatttaaattataattatttttatagcacgtgatgaaaaggaccgggaagctccaccccggttgataatcagaaaagccccaaaaacaggaagattgtataagcaaatatttaaattgtaaacgttaatattttgttaaaattcgcgttaaatttttgttaaatcagctcattttttaacgaatagcccgaaatcggcaaaatcccttataaatcaaaagaatagaccgagatagggttgagtgttgttccagtttccaacaagagtccactattaaagaacgtggactccaacgtcaaagggcgaaaaagggtctatcagggcgatggcccactacgtgaaccatcaccctaatcaagttttttggggtcgaggtgccgtaaagcagtaaatcggaagggtaaacggatgcccccatttagagcttgacggggaaagccggcgaacgtggcgagaaaggaagggaagaaagcgaaaggagcgggggctagggcggtgggaagtgtaggggtcacgctgggcgtaaccaccacacccgccgcgcttaatggggcgctacagggcgcgtggggatgatccactagtacggattagaagccgccgagcgggtgacagccctccgaaggaagactctcctccgtgcgtcctcgtcttcaccggtcgcgttcctgaaacgcagatgtgcctcgcgccgcactgctccgaacaataaagattctacaatactagcttttatggttatgaagaggaaaaattggcagtaacctggccccacaaaccttcaaatgaacgaatcaaattaacaaccataggatgataatgcgattagttttttagccttatttctggggtaattaatcagcgaagcgatgatttttgatctattaacagatatataaatgcaaaaactgcataaccactttaactaatactttcaacattttcggtttgtattacttcttattcaaatgtaataaaagtatcaacaaaaaattgttaatatacctctatactttaacgtcaaggagaaaaaaccccggatcggactactagcagctgtaatacgactcactatagggaatattaagcttaaacaatgaggcaggtttggttctcttggattgtgggattgttcctatgttttttcaacgtgtcttctgctgctccagtcaacactacaacagaagatgaaacggcacaaattccggctgaagctgtcatcggttactcagatttagaaggggatttcgatgttgctgttttgccattttccaacagcacaaataacgggttattgtttataaatactactattgccagcattgctgctaaagaagaaggggtatctctcgagaaaagagaggctgaagctatgccaagagaaaacttcttgaagtgcttctcccaatatatcccaaacaacgctactaacttaaagttagtttacactcaaaacaatccattatacatgtctgtcttaaactctactattcataacttaagatttacttccgatactacccctaagccattggttatcgtcaccccaacgcacgtctcccatatccaaggtactatcttatgttctaagaaggttggtttgcaaatccgtactagatctggtggtcacgacgccgaaggtatgtcctatatctctcaagtcccatttgtcattgttgacttaagaaatatgagatccattaaaattgatgttcattctcaaactgcttgggtcgaagctggtgccaccttgggtgaagtttactactgggtcaacgaaaaaaacgaaaacttatctttagctgccggttactgtccaaccgtctgtgctggtggtcatttcggtggtggtggttacggtccattgatgcgtaactacggtttagctgctgacaacattattgacgctcatttagttaatgttcacggtaaggttttggacagaaaatctatgggtgaagatttattttgggccttgagaggtggtggtgctgaatccttcggtatcatcgttgcctggaagattcgtttagttgctgtcccttctaagtccaccatgttctccgtcaagaaaatcatggaaattcatgagttggtcaaattggttaacaagtggcaaaacatcgcttacaagtatgacaaggatttgttgttaatgactcacttcatcacccgtaatatcaccgacaaccaaggtaagaacaaaactgctattcacacctacttctcctccgtttttttgggtggtgtcgactccttagtcgatttgatgaacaaatcctttccagaattgggtattaagaaaactgattgtagacaattgtcttggattgacaccattatcttctattctggtgtcgttaactacgacaccgacaactttaacaaggaaattttgttggatcgttctgctggtcaaaatggtgccttcaaaatcaaattggactacgtcaaaaagccaatcccagaatctgttttcgttcaaattttggaaaagttgtacgaagaagacattggtgccggtatgtatgctttgtatccatatggtggtatcatggacgaaatttccgaatctgccatcccattcccacacagagctggtattttatatgaattgtggtacatctgttcttgggaaaagcaagaagacaacgaaaagcatttaaactggattagaaacatttacaacttcatgaccccatacgtttctaagaacccaagattagcctatttgaactaccgtgacttagatattggtattaatgacccaaagaacccaaacaactatactcaagccagaatttggggtgaaaagtacttcggtaagaacttcgatagattagttaaggttaaaactttggtcgatccaaacaacttcttcagaaacgaacaatccatcccaccattgccaagacatcgtcacggccatcatcaccatcaccattagctcgagcatgcatctagagggccgcatcatgtaattagttatgtcacgcttacattcacgccctccccccacatccgctctaaccgaaaaggaaggagttagacaacctgaagtctaggtccctatttatttttttatagttatgttagtattaagaacgttatttatatttcaaatttttcttttttttctgtacagacgcgtgtacgcatgtaacattatactgaaaaccttgcttgagaaggttttgggacgctcgaaggctttaatttgcggccctgcattaatgaatcggccaacgcgcggggagaggcggtttgcgtattgggcgctcttccgcttcctcgctcactgactcgctgcgctcggtcgttcggctgcggcgagcggtatcagctcactcaaaggcggtaatacggttatccacagaatcaggggataacgcaggaaagaacatgtgagcaaaaggccagcaaaagcccaggaaccgtaaaaaggccgcgttgctggcgtttttccataggctccgcccccctgacgagcatcacaaaaatcgacgctcaagtcagaggtggcgaaacccgacaggactataaagataccaggcgtttccccctggaagctccctcgtgcgctctcctgttccgaccctgccgcttaccggatacctgtccgcctttctcccttcgggaagcgtggcgctttctcatagctcacgctgtaggtatctcagttcggtgtaggtcgttcgctccaagctgggctgtgtgcacgaaccccccgttcagcccgaccgctgcgccttatccggtaactatcgtcttgagtccaacccggtaagacacgacttatcgccactggcagcagccactggtaacaggattagcagagcgaggtatgtaggcggtgctacagagttcttgaagtggtggcctaactacggctacactagaagaacagtatttggtatctgcgctctgctgaagccagttaccttcggaaaaagagttggtagctcttgatccggcaaacaaaccaccgctggtagcggtggtttttttgtttgcaagcagcagattacgcgcagaaaaaaaggatctcaagaagatcctttgatcttttctacggggtctgacgctcagtggaacgaaaactcacgttaagggattttggtcatgagattatcaaaaaggatcttcacctagatccttttaaattaaaaatgaagttttaaatcaatctaaagtatatatgagtaaacttggtctgacagttaccaatgcttaatcagtgaggcacctatctcagcgatctgtctatttcgttcatccatagttgcctgactccccgtcgtgtagataactacgatacgggagcgcttaccatctggccccagtgctgcaatgataccgcgagacccacgctcaccggctccagatttatcagcaataaaccagccagccggaagggccgagcgcagaagtggtcctgcaactttatccgcctccattcagtctattaattgttgccgggaagctagagtaagtagttcgccagttaatagtttgcgcaacgttgttggcattgctacaggcatcgtggtgtcactctcgtcgtttggtatggcttcattcagctccggttcccaacgatcaaggcgagttacatgatcccccatgttgtgcaaaaaagcggttagctccttcggtcctccgatcgttgtcagaagtaagttggccgcagtgttatcactcatggttatggcagcactgcataattctcttactgtcatgccatccgtaagatgcttttctgtgactggtgagtactcaaccaagtcattctgagaatagtgtatgcggcgaccgagttgctcttgcccggcgtcaatacgggataatagtgtatcacatagcagaactttaaaagtgctcatcattggaaaacgttcttcggggcgaaaactctcaaggatcttaccgctgttgagatccagttcgatgtaacccactcgtgcacccaactgatcttcagcatcttttactttcaccagcgtttctgggtgagcaaaaacaggaaggcaaaatgccgcaaaaaagggaataagggcgacacggaaatgttgaatactcatactcttcctttttcaatgggtaataactgatataattaaattgaagctctaatttgtgagtttagtatacatgcatttacttataatacagttttttagttttgctggccgcatcttctcaaatatgcttcccagcctgcttttctgtaacgttcaccctctaccttagcatcccttccctttgcaaatagtcctcttccaacaataataatgtcagatcctgtagagaccacatcatccacggttctatactgttgacccaatgcgtctcccttgtcatctaaacccacaccgggtgtcataatcaaccaatcgtaaccttcatctcttccacccatgtctctttgagcaataaagccgataacaaaatctttgtcgctcttcgcaatgtcaacagtacccttagtatattctccagtagatagggagcccttgcatgacaattctgctaacatcaaaaggcctctaggttcctttgttacttcttctgccgcctgcttcaaaccgctaacaatacctgggcccaccacaccgtgtgcattcgtaatgtctgcccattctgctattctgtatacacccgcagagtactgcaatttgactgtattaccaatgtcagcaaattttctgtcttcg

SEQ ID NO: 21 - DNA, 7266 bp, Artificial Sequence
  OXC154-R3T/A18E/T49R/S60T/S88A(=GCT)
aagagtaaaaaattgtacttggcggataatgcctttagcggcttaactgtgccctccatggaaaaatcagtcaagatatccacatgtgtttttagtaaacaaattttgggacctaatgcttcaactaactccagtaattccttggtggtacgaacatccaatgaagcacacaagtttgtttgcttttcgtgcatgatattaaatagcttggcagcaacaggactaggatgagtagcagcacgttccttatatgtagctttcgacatgatttatcttcgtttcctgcaggtttttgttctgtgcagttgggttaagaatactgggcaatttcatgtttcttcaacactacatatgcgtatatataccaatctaagtctgtgctccttccttcgttcttccttctgttcggagattaccgaatcaaaaaaatttcaaagaaaccgaaatcaaaaaaaagaataaaaaaaaaatgatgaattgaattgaaaagctagcttatcgatgataagctgtcaaagatgagaattaattccacggactatagactatactagatactccgtctactgtacgatacacttccgctcaggtccttgtcctttaacgaggccttaccactcttttgttactctattgatccagctcagcaaaggcagtgtgatctaagattctatcttcgcgatgtagtaaaactagctagaccgagaaagagactagaaatgcaaaaggcacttctacaatggctgccatcattattatccgatgtgacgctgcagcttctcaatgatattcgaatacgctttgaggagatacagcctaatatccgacaaactgttttacagatttacgatcgtacttgttacccatcattgaattttgaacatccgaacctgggagttttccctgaaacagatagtatatttgaacctgtataataatatatagtctagcgctttacggaagacaatgtatgtatttcggttcctggagaaactattgcatctattgcataggtaatcttgcacgtcgcatccccggttcattttctgcgtttccatcttgcacttcaatagcatatctttgttcgcttgcctgtaacttacacgcgcctcgtatcttttaatgatggaataatttgggaatttactctgtgtttatttatttttatgttttgtatttggattttagaaagtaaataaagaaggtagaagagttacggaatgaagaaaaaaaaataaacaaaggtttaaaaaatttcaacaaaaagcgtactttacatatatatttattagacaagaaaagcagattaaatagatatacattcgattaacgataagtaaaatgtaaaatcacaggattttcgtgtgtggtcttctacacagacaagatgaaacaattcggcattaatacctgagagcaggaagagcaagataaaaggtagtatttgttggcgatccccctagagtcttttacatcttcggaaaacaaaaactattttttctttaatttctttttttactttctatttttaatttatatatttatattaaaaaatttaaattataattatttttatagcacgtgatgaaaaggaccgggaagctccaccccggttgataatcagaaaagccccaaaaacaggaagattgtataagcaaatatttaaattgtaaacgttaatattttgttaaaattcgcgttaaatttttgttaaatcagctcattttttaacgaatagcccgaaatcggcaaaatcccttataaatcaaaagaatagaccgagatagggttgagtgttgttccagtttccaacaagagtccactattaaagaacgtggactccaacgtcaaagggcgaaaaagggtctatcagggcgatggcccactacgtgaaccatcaccctaatcaagttttttggggtcgaggtgccgtaaagcagtaaatcggaagggtaaacggatgcccccatttagagcttgacggggaaagccggcgaacgtggcgagaaaggaagggaagaaagcgaaaggagcgggggctagggcggtgggaagtgtaggggtcacgctgggcgtaaccaccacacccgccgcgcttaatggggcgctacagggcgcgtggggatgatccactagtacggattagaagccgccgagcgggtgacagccctccgaaggaagactctcctccgtgcgtcctcgtcttcaccggtcgcgttcctgaaacgcagatgtgcctcgcgccgcactgctccgaacaataaagattctacaatactagcttttatggttatgaagaggaaaaattggcagtaacctggccccacaaaccttcaaatgaacgaatcaaattaacaaccataggatgataatgcgattagttttttagccttatttctggggtaattaatcagcgaagcgatgatttttgatctattaacagatatataaatgcaaaaactgcataaccactttaactaatactttcaacattttcggtttgtattacttcttattcaaatgtaataaaagtatcaacaaaaaattgttaatatacctctatactttaacgtcaaggagaaaaaaccccggatcggactactagcagctgtaatacgactcactatagggaatattaagcttaaacaatgaggcaggtttggttctcttggattgtgggattgttcctatgttttttcaacgtgtcttctgctgctccagtcaacactacaacagaagatgaaacggcacaaattccggctgaagctgtcatcggttactcagatttagaaggggatttcgatgttgctgttttgccattttccaacagcacaaataacgggttattgtttataaatactactattgccagcattgctgctaaagaagaaggggtatctctcgagaaaagagaggctgaagctatgccaacggaaaacttcttgaagtgcttctcccaatatatcccaaacaacgagactaacttaaagttagtttacactcaaaacaatccattatacatgtctgtcttaaactctactattcataacttaagatttacttccgatcggacccctaagccattggttatcgtcaccccaacgcacgtctcccatatccaaggtactatcttatgttctaagaaggttggtttgcaaatccgtactagatctggtggtcacgacgctgaaggtatgtcctatatctctcaagtcccatttgtcattgttgacttaagaaatatgagatccattaaaattgatgttcattctcaaactgcttgggtcgaagctggtgccaccttgggtgaagtttactactgggtcaacgaaaaaaacgaaaacttatctttagctgccggttactgtccaaccgtctgtgctggtggtcatttcggtggtggtggttacggtccattgatgcgtaactacggtttagctgctgacaacattattgacgctcatttagttaatgttcacggtaaggttttggacagaaaatctatgggtgaagatttattttgggccttgagaggtggtggtgctgaatccttcggtatcatcgttgcctggaagattcgtttagttgctgtcccttctaagtccaccatgttctccgtcaagaaaatcatggaaattcatgagttggtcaaattggttaacaagtggcaaaacatcgcttacaagtatgacaaggatttgttgttaatgactcacttcatcacccgtaatatcaccgacaaccaaggtaagaacaaaactgctattcacacctacttctcctccgtttttttgggtggtgtcgactccttagtcgatttgatgaacaaatcctttccagaattgggtattaagaaaactgattgtagacaattgtcttggattgacaccattatcttctattctggtgtcgttaactacgacaccgacaactttaacaaggaaattttgttggatcgttctgctggtcaaaatggtgccttcaaaatcaaattggactacgtcaaaaagccaatcccagaatctgttttcgttcaaattttggaaaagttgtacgaagaagacattggtgccggtatgtatgctttgtatccatatggtggtatcatggacgaaatttccgaatctgccatcccattcccacacagagctggtattttatatgaattgtggtacatctgttcttgggaaaagcaagaagacaacgaaaagcatttaaactggattagaaacatttacaacttcatgaccccatacgtttctaagaacccaagattagcctatttgaactaccgtgacttagatattggtattaatgacccaaagaacccaaacaactatactcaagccagaatttggggtgaaaagtacttcggtaagaacttcgatagattagttaaggttaaaactttggtcgatccaaacaacttcttcagaaacgaacaatccatcccaccattgccaagacatcgtcacggccatcatcaccatcaccattagctcgagcatgcatctagagggccgcatcatgtaattagttatgtcacgcttacattcacgccctccccccacatccgctctaaccgaaaaggaaggagttagacaacctgaagtctaggtccctatttatttttttatagttatgttagtattaagaacgttatttatatttcaaatttttcttttttttctgtacagacgcgtgtacgcatgtaacattatactgaaaaccttgcttgagaaggttttgggacgctcgaaggctttaatttgcggccctgcattaatgaatcggccaacgcgcggggagaggcggtttgcgtattgggcgctcttccgcttcctcgctcactgactcgctgcgctcggtcgttcggctgcggcgagcggtatcagctcactcaaaggcggtaatacggttatccacagaatcaggggataacgcaggaaagaacatgtgagcaaaaggccagcaaaagcccaggaaccgtaaaaaggccgcgttgctggcgtttttccataggctccgcccccctgacgagcatcacaaaaatcgacgctcaagtcagaggtggcgaaacccgacaggactataaagataccaggcgtttccccctggaagctccctcgtgcgctctcctgttccgaccctgccgcttaccggatacctgtccgcctttctcccttcgggaagcgtggcgctttctcatagctcacgctgtaggtatctcagttcggtgtaggtcgttcgctccaagctgggctgtgtgcacgaaccccccgttcagcccgaccgctgcgccttatccggtaactatcgtcttgagtccaacccggtaagacacgacttatcgccactggcagcagccactggtaacaggattagcagagcgaggtatgtaggcggtgctacagagttcttgaagtggtggcctaactacggctacactagaagaacagtatttggtatctgcgctctgctgaagccagttaccttcggaaaaagagttggtagctcttgatccggcaaacaaaccaccgctggtagcggtggtttttttgtttgcaagcagcagattacgcgcagaaaaaaaggatctcaagaagatcctttgatcttttctacggggtctgacgctcagtggaacgaaaactcacgttaagggattttggtcatgagattatcaaaaaggatcttcacctagatccttttaaattaaaaatgaagttttaaatcaatctaaagtatatatgagtaaacttggtctgacagttaccaatgcttaatcagtgaggcacctatctcagcgatctgtctatttcgttcatccatagttgcctgactccccgtcgtgtagataactacgatacgggagcgcttaccatctggccccagtgctgcaatgataccgcgagacccacgctcaccggctccagatttatcagcaataaaccagccagccggaagggccgagcgcagaagtggtcctgcaactttatccgcctccattcagtctattaattgttgccgggaagctagagtaagtagttcgccagttaatagtttgcgcaacgttgttggcattgctacaggcatcgtggtgtcactctcgtcgtttggtatggcttcattcagctccggttcccaacgatcaaggcgagttacatgatcccccatgttgtgcaaaaaagcggttagctccttcggtcctccgatcgttgtcagaagtaagttggccgcagtgttatcactcatggttatggcagcactgcataattctcttactgtcatgccatccgtaagatgcttttctgtgactggtgagtactcaaccaagtcattctgagaatagtgtatgcggcgaccgagttgctcttgcccggcgtcaatacgggataatagtgtatcacatagcagaactttaaaagtgctcatcattggaaaacgttcttcggggcgaaaactctcaaggatcttaccgctgttgagatccagttcgatgtaacccactcgtgcacccaactgatcttcagcatcttttactttcaccagcgtttctgggtgagcaaaaacaggaaggcaaaatgccgcaaaaaagggaataagggcgacacggaaatgttgaatactcatactcttcctttttcaatgggtaataactgatataattaaattgaagctctaatttgtgagtttagtatacatgcatttacttataatacagttttttagttttgctggccgcatcttctcaaatatgcttcccagcctgcttttctgtaacgttcaccctctaccttagcatcccttccctttgcaaatagtcctcttccaacaataataatgtcagatcctgtagagaccacatcatccacggttctatactgttgacccaatgcgtctcccttgtcatctaaacccacaccgggtgtcataatcaaccaatcgtaaccttcatctcttccacccatgtctctttgagcaataaagccgataacaaaatctttgtcgctcttcgcaatgtcaacagtacccttagtatattctccagtagatagggagcccttgcatgacaattctgctaacatcaaaaggcctctaggttcctttgttacttcttctgccgcctgcttcaaaccgctaacaatacctgggcccaccacaccgtgtgcattcgtaatgtctgcccattctgctattctgtatacacccgcagagtactgcaatttgactgtattaccaatgtcagcaaattttctgtcttcg

SEQ ID NO: 22 - DNA, 7266 bp, Artificial Sequence
  OXC154-R3W/L21G/T49R/S88A(=GCC)/V97E
aagagtaaaaaattgtacttggcggataatgcctttagcggcttaactgtgccctccatggaaaaatcagtcaagatatccacatgtgtttttagtaaacaaattttgggacctaatgcttcaactaactccagtaattccttggtggtacgaacatccaatgaagcacacaagtttgtttgcttttcgtgcatgatattaaatagcttggcagcaacaggactaggatgagtagcagcacgttccttatatgtagctttcgacatgatttatcttcgtttcctgcaggtttttgttctgtgcagttgggttaagaatactgggcaatttcatgtttcttcaacactacatatgcgtatatataccaatctaagtctgtgctccttccttcgttcttccttctgttcggagattaccgaatcaaaaaaatttcaaagaaaccgaaatcaaaaaaaagaataaaaaaaaaatgatgaattgaattgaaaagctagcttatcgatgataagctgtcaaagatgagaattaattccacggactatagactatactagatactccgtctactgtacgatacacttccgctcaggtccttgtcctttaacgaggccttaccactcttttgttactctattgatccagctcagcaaaggcagtgtgatctaagattctatcttcgcgatgtagtaaaactagctagaccgagaaagagactagaaatgcaaaaggcacttctacaatggctgccatcattattatccgatgtgacgctgcagcttctcaatgatattcgaatacgctttgaggagatacagcctaatatccgacaaactgttttacagatttacgatcgtacttgttacccatcattgaattttgaacatccgaacctgggagttttccctgaaacagatagtatatttgaacctgtataataatatatagtctagcgctttacggaagacaatgtatgtatttcggttcctggagaaactattgcatctattgcataggtaatcttgcacgtcgcatccccggttcattttctgcgtttccatcttgcacttcaatagcatatctttgttcgcttgcctgtaacttacacgcgcctcgtatcttttaatgatggaataatttgggaatttactctgtgtttatttatttttatgttttgtatttggattttagaaagtaaataaagaaggtagaagagttacggaatgaagaaaaaaaaataaacaaaggtttaaaaaatttcaacaaaaagcgtactttacatatatatttattagacaagaaaagcagattaaatagatatacattcgattaacgataagtaaaatgtaaaatcacaggattttcgtgtgtggtcttctacacagacaagatgaaacaattcggcattaatacctgagagcaggaagagcaagataaaaggtagtatttgttggcgatccccctagagtcttttacatcttcggaaaacaaaaactattttttctttaatttctttttttactttctatttttaatttatatatttatattaaaaaatttaaattataattatttttatagcacgtgatgaaaaggaccgggaagctccaccccggttgataatcagaaaagccccaaaaacaggaagattgtataagcaaatatttaaattgtaaacgttaatattttgttaaaattcgcgttaaatttttgttaaatcagctcattttttaacgaatagcccgaaatcggcaaaatcccttataaatcaaaagaatagaccgagatagggttgagtgttgttccagtttccaacaagagtccactattaaagaacgtggactccaacgtcaaagggcgaaaaagggtctatcagggcgatggcccactacgtgaaccatcaccctaatcaagttttttggggtcgaggtgccgtaaagcagtaaatcggaagggtaaacggatgcccccatttagagcttgacggggaaagccggcgaacgtggcgagaaaggaagggaagaaagcgaaaggagcgggggctagggcggtgggaagtgtaggggtcacgctgggcgtaaccaccacacccgccgcgcttaatggggcgctacagggcgcgtggggatgatccactagtacggattagaagccgccgagcgggtgacagccctccgaaggaagactctcctccgtgcgtcctcgtcttcaccggtcgcgttcctgaaacgcagatgtgcctcgcgccgcactgctccgaacaataaagattctacaatactagcttttatggttatgaagaggaaaaattggcagtaacctggccccacaaaccttcaaatgaacgaatcaaattaacaaccataggatgataatgcgattagttttttagccttatttctggggtaattaatcagcgaagcgatgatttttgatctattaacagatatataaatgcaaaaactgcataaccactttaactaatactttcaacattttcggtttgtattacttcttattcaaatgtaataaaagtatcaacaaaaaattgttaatatacctctatactttaacgtcaaggagaaaaaaccccggatcggactactagcagctgtaatacgactcactatagggaatattaagcttaaacaatgaggcaggtttggttctcttggattgtgggattgttcctatgttttttcaacgtgtcttctgctgctccagtcaacactacaacagaagatgaaacggcacaaattccggctgaagctgtcatcggttactcagatttagaaggggatttcgatgttgctgttttgccattttccaacagcacaaataacgggttattgtttataaatactactattgccagcattgctgctaaagaagaaggggtatctctcgagaaaagagaggctgaagctatgccatgggaaaacttcttgaagtgcttctcccaatatatcccaaacaacgctactaacgggaagttagtttacactcaaaacaatccattatacatgtctgtcttaaactctactattcataacttaagatttacttccgatcggacccctaagccattggttatcgtcaccccatctcacgtctcccatatccaaggtactatcttatgttctaagaaggttggtttgcaaatccgtactagatctggtggtcacgacgccgaaggtatgtcctatatctctcaagagccatttgtcattgttgacttaagaaatatgagatccattaaaattgatgttcattctcaaactgcttgggtcgaagctggtgccaccttgggtgaagtttactactgggtcaacgaaaaaaacgaaaacttatctttagctgccggttactgtccaaccgtctgtgctggtggtcatttcggtggtggtggttacggtccattgatgcgtaactacggtttagctgctgacaacattattgacgctcatttagttaatgttcacggtaaggttttggacagaaaatctatgggtgaagatttattttgggccttgagaggtggtggtgctgaatccttcggtatcatcgttgcctggaagattcgtttagttgctgtcccttctaagtccaccatgttctccgtcaagaaaatcatggaaattcatgagttggtcaaattggttaacaagtggcaaaacatcgcttacaagtatgacaaggatttgttgttaatgactcacttcatcacccgtaatatcaccgacaaccaaggtaagaacaaaactgctattcacacctacttctcctccgtttttttgggtggtgtcgactccttagtcgatttgatgaacaaatcctttccagaattgggtattaagaaaactgattgtagacaattgtcttggattgacaccattatcttctattctggtgtcgttaactacgacaccgacaactttaacaaggaaattttgttggatcgttctgctggtcaaaatggtgccttcaaaatcaaattggactacgtcaaaaagccaatcccagaatctgttttcgttcaaattttggaaaagttgtacgaagaagacattggtgccggtatgtatgctttgtatccatatggtggtatcatggacgaaatttccgaatctgccatcccattcccacacagagctggtattttatatgaattgtggtacatctgttcttgggaaaagcaagaagacaacgaaaagcatttaaactggattagaaacatttacaacttcatgaccccatacgtttctaagaacccaagattagcctatttgaactaccgtgacttagatattggtattaatgacccaaagaacccaaacaactatactcaagccagaatttggggtgaaaagtacttcggtaagaacttcgatagattagttaaggttaaaactttggtcgatccaaacaacttcttcagaaacgaacaatccatcccaccattgccaagacatcgtcacggccatcatcaccatcaccattagctcgagcatgcatctagagggccgcatcatgtaattagttatgtcacgcttacattcacgccctccccccacatccgctctaaccgaaaaggaaggagttagacaacctgaagtctaggtccctatttatttttttatagttatgttagtattaagaacgttatttatatttcaaatttttcttttttttctgtacagacgcgtgtacgcatgtaacattatactgaaaaccttgcttgagaaggttttgggacgctcgaaggctttaatttgcggccctgcattaatgaatcggccaacgcgcggggagaggcggtttgcgtattgggcgctcttccgcttcctcgctcactgactcgctgcgctcggtcgttcggctgcggcgagcggtatcagctcactcaaaggcggtaatacggttatccacagaatcaggggataacgcaggaaagaacatgtgagcaaaaggccagcaaaagcccaggaaccgtaaaaaggccgcgttgctggcgtttttccataggctccgcccccctgacgagcatcacaaaaatcgacgctcaagtcagaggtggcgaaacccgacaggactataaagataccaggcgtttccccctggaagctccctcgtgcgctctcctgttccgaccctgccgcttaccggatacctgtccgcctttctcccttcgggaagcgtggcgctttctcatagctcacgctgtaggtatctcagttcggtgtaggtcgttcgctccaagctgggctgtgtgcacgaaccccccgttcagcccgaccgctgcgccttatccggtaactatcgtcttgagtccaacccggtaagacacgacttatcgccactggcagcagccactggtaacaggattagcagagcgaggtatgtaggcggtgctacagagttcttgaagtggtggcctaactacggctacactagaagaacagtatttggtatctgcgctctgctgaagccagttaccttcggaaaaagagttggtagctcttgatccggcaaacaaaccaccgctggtagcggtggtttttttgtttgcaagcagcagattacgcgcagaaaaaaaggatctcaagaagatcctttgatcttttctacggggtctgacgctcagtggaacgaaaactcacgttaagggattttggtcatgagattatcaaaaaggatcttcacctagatccttttaaattaaaaatgaagttttaaatcaatctaaagtatatatgagtaaacttggtctgacagttaccaatgcttaatcagtgaggcacctatctcagcgatctgtctatttcgttcatccatagttgcctgactccccgtcgtgtagataactacgatacgggagcgcttaccatctggccccagtgctgcaatgataccgcgagacccacgctcaccggctccagatttatcagcaataaaccagccagccggaagggccgagcgcagaagtggtcctgcaactttatccgcctccattcagtctattaattgttgccgggaagctagagtaagtagttcgccagttaatagtttgcgcaacgttgttggcattgctacaggcatcgtggtgtcactctcgtcgtttggtatggcttcattcagctccggttcccaacgatcaaggcgagttacatgatcccccatgttgtgcaaaaaagcggttagctccttcggtcctccgatcgttgtcagaagtaagttggccgcagtgttatcactcatggttatggcagcactgcataattctcttactgtcatgccatccgtaagatgcttttctgtgactggtgagtactcaaccaagtcattctgagaatagtgtatgcggcgaccgagttgctcttgcccggcgtcaatacgggataatagtgtatcacatagcagaactttaaaagtgctcatcattggaaaacgttcttcggggcgaaaactctcaaggatcttaccgctgttgagatccagttcgatgtaacccactcgtgcacccaactgatcttcagcatcttttactttcaccagcgtttctgggtgagcaaaaacaggaaggcaaaatgccgcaaaaaagggaataagggcgacacggaaatgttgaatactcatactcttcctttttcaatgggtaataactgatataattaaattgaagctctaatttgtgagtttagtatacatgcatttacttataatacagttttttagttttgctggccgcatcttctcaaatatgcttcccagcctgcttttctgtaacgttcaccctctaccttagcatcccttccctttgcaaatagtcctcttccaacaataataatgtcagatcctgtagagaccacatcatccacggttctatactgttgacccaatgcgtctcccttgtcatctaaacccacaccgggtgtcataatcaaccaatcgtaaccttcatctcttccacccatgtctctttgagcaataaagccgataacaaaatctttgtcgctcttcgcaatgtcaacagtacccttagtatattctccagtagatagggagcccttgcatgacaattctgctaacatcaaaaggcctctaggttcctttgttacttcttctgccgcctgcttcaaaccgctaacaatacctgggcccaccacaccgtgtgcattcgtaatgtctgcccattctgctattctgtatacacccgcagagtactgcaatttgactgtattaccaatgtcagcaaattttctgtcttcg

SEQ ID NO: 23 - DNA, 7266 bp, Artificial Sequence
  OXC154-R3T/A18E/T49R/S60T
aagagtaaaaaattgtacttggcggataatgcctttagcggcttaactgtgccctccatggaaaaatcagtcaagatatccacatgtgtttttagtaaacaaattttgggacctaatgcttcaactaactccagtaattccttggtggtacgaacatccaatgaagcacacaagtttgtttgcttttcgtgcatgatattaaatagcttggcagcaacaggactaggatgagtagcagcacgttccttatatgtagctttcgacatgatttatcttcgtttcctgcaggtttttgttctgtgcagttgggttaagaatactgggcaatttcatgtttcttcaacactacatatgcgtatatataccaatctaagtctgtgctccttccttcgttcttccttctgttcggagattaccgaatcaaaaaaatttcaaagaaaccgaaatcaaaaaaaagaataaaaaaaaaatgatgaattgaattgaaaagctagcttatcgatgataagctgtcaaagatgagaattaattccacggactatagactatactagatactccgtctactgtacgatacacttccgctcaggtccttgtcctttaacgaggccttaccactcttttgttactctattgatccagctcagcaaaggcagtgtgatctaagattctatcttcgcgatgtagtaaaactagctagaccgagaaagagactagaaatgcaaaaggcacttctacaatggctgccatcattattatccgatgtgacgctgcagcttctcaatgatattcgaatacgctttgaggagatacagcctaatatccgacaaactgttttacagatttacgatcgtacttgttacccatcattgaattttgaacatccgaacctgggagttttccctgaaacagatagtatatttgaacctgtataataatatatagtctagcgctttacggaagacaatgtatgtatttcggttcctggagaaactattgcatctattgcataggtaatcttgcacgtcgcatccccggttcattttctgcgtttccatcttgcacttcaatagcatatctttgttcgcttgcctgtaacttacacgcgcctcgtatcttttaatgatggaataatttgggaatttactctgtgtttatttatttttatgttttgtatttggattttagaaagtaaataaagaaggtagaagagttacggaatgaagaaaaaaaaataaacaaaggtttaaaaaatttcaacaaaaagcgtactttacatatatatttattagacaagaaaagcagattaaatagatatacattcgattaacgataagtaaaatgtaaaatcacaggattttcgtgtgtggtcttctacacagacaagatgaaacaattcggcattaatacctgagagcaggaagagcaagataaaaggtagtatttgttggcgatccccctagagtcttttacatcttcggaaaacaaaaactattttttctttaatttctttttttactttctatttttaatttatatatttatattaaaaaatttaaattataattatttttatagcacgtgatgaaaaggaccgggaagctccaccccggttgataatcagaaaagccccaaaaacaggaagattgtataagcaaatatttaaattgtaaacgttaatattttgttaaaattcgcgttaaatttttgttaaatcagctcattttttaacgaatagcccgaaatcggcaaaatcccttataaatcaaaagaatagaccgagatagggttgagtgttgttccagtttccaacaagagtccactattaaagaacgtggactccaacgtcaaagggcgaaaaagggtctatcagggcgatggcccactacgtgaaccatcaccctaatcaagttttttggggtcgaggtgccgtaaagcagtaaatcggaagggtaaacggatgcccccatttagagcttgacggggaaagccggcgaacgtggcgagaaaggaagggaagaaagcgaaaggagcgggggctagggcggtgggaagtgtaggggtcacgctgggcgtaaccaccacacccgccgcgcttaatggggcgctacagggcgcgtggggatgatccactagtacggattagaagccgccgagcgggtgacagccctccgaaggaagactctcctccgtgcgtcctcgtcttcaccggtcgcgttcctgaaacgcagatgtgcctcgcgccgcactgctccgaacaataaagattctacaatactagcttttatggttatgaagaggaaaaattggcagtaacctggccccacaaaccttcaaatgaacgaatcaaattaacaaccataggatgataatgcgattagttttttagccttatttctggggtaattaatcagcgaagcgatgatttttgatctattaacagatatataaatgcaaaaactgcataaccactttaactaatactttcaacattttcggtttgtattacttcttattcaaatgtaataaaagtatcaacaaaaaattgttaatatacctctatactttaacgtcaaggagaaaaaaccccggatcggactactagcagctgtaatacgactcactatagggaatattaagcttaaacaatgaggcaggtttggttctcttggattgtgggattgttcctatgttttttcaacgtgtcttctgctgctccagtcaacactacaacagaagatgaaacggcacaaattccggctgaagctgtcatcggttactcagatttagaaggggatttcgatgttgctgttttgccattttccaacagcacaaataacgggttattgtttataaatactactattgccagcattgctgctaaagaagaaggggtatctctcgagaaaagagaggctgaagctatgccaacggaaaacttcttgaagtgcttctcccaatatatcccaaacaacgagactaacttaaagttagtttacactcaaaacaatccattatacatgtctgtcttaaactctactattcataacttaagatttacttccgatcggacccctaagccattggttatcgtcaccccaacgcacgtctcccatatccaaggtactatcttatgttctaagaaggttggtttgcaaatccgtactagatctggtggtcacgactctgaaggtatgtcctatatctctcaagtcccatttgtcattgttgacttaagaaatatgagatccattaaaattgatgttcattctcaaactgcttgggtcgaagctggtgccaccttgggtgaagtttactactgggtcaacgaaaaaaacgaaaacttatctttagctgccggttactgtccaaccgtctgtgctggtggtcatttcggtggtggtggttacggtccattgatgcgtaactacggtttagctgctgacaacattattgacgctcatttagttaatgttcacggtaaggttttggacagaaaatctatgggtgaagatttattttgggccttgagaggtggtggtgctgaatccttcggtatcatcgttgcctggaagattcgtttagttgctgtcccttctaagtccaccatgttctccgtcaagaaaatcatggaaattcatgagttggtcaaattggttaacaagtggcaaaacatcgcttacaagtatgacaaggatttgttgttaatgactcacttcatcacccgtaatatcaccgacaaccaaggtaagaacaaaactgctattcacacctacttctcctccgtttttttgggtggtgtcgactccttagtcgatttgatgaacaaatcctttccagaattgggtattaagaaaactgattgtagacaattgtcttggattgacaccattatcttctattctggtgtcgttaactacgacaccgacaactttaacaaggaaattttgttggatcgttctgctggtcaaaatggtgccttcaaaatcaaattggactacgtcaaaaagccaatcccagaatctgttttcgttcaaattttggaaaagttgtacgaagaagacattggtgccggtatgtatgctttgtatccatatggtggtatcatggacgaaatttccgaatctgccatcccattcccacacagagctggtattttatatgaattgtggtacatctgttcttgggaaaagcaagaagacaacgaaaagcatttaaactggattagaaacatttacaacttcatgaccccatacgtttctaagaacccaagattagcctatttgaactaccgtgacttagatattggtattaatgacccaaagaacccaaacaactatactcaagccagaatttggggtgaaaagtacttcggtaagaacttcgatagattagttaaggttaaaactttggtcgatccaaacaacttcttcagaaacgaacaatccatcccaccattgccaagacatcgtcacggccatcatcaccatcaccattagctcgagcatgcatctagagggccgcatcatgtaattagttatgtcacgcttacattcacgccctccccccacatccgctctaaccgaaaaggaaggagttagacaacctgaagtctaggtccctatttatttttttatagttatgttagtattaagaacgttatttatatttcaaatttttcttttttttctgtacagacgcgtgtacgcatgtaacattatactgaaaaccttgcttgagaaggttttgggacgctcgaaggctttaatttgcggccctgcattaatgaatcggccaacgcgcggggagaggcggtttgcgtattgggcgctcttccgcttcctcgctcactgactcgctgcgctcggtcgttcggctgcggcgagcggtatcagctcactcaaaggcggtaatacggttatccacagaatcaggggataacgcaggaaagaacatgtgagcaaaaggccagcaaaagcccaggaaccgtaaaaaggccgcgttgctggcgtttttccataggctccgcccccctgacgagcatcacaaaaatcgacgctcaagtcagaggtggcgaaacccgacaggactataaagataccaggcgtttccccctggaagctccctcgtgcgctctcctgttccgaccctgccgcttaccggatacctgtccgcctttctcccttcgggaagcgtggcgctttctcatagctcacgctgtaggtatctcagttcggtgtaggtcgttcgctccaagctgggctgtgtgcacgaaccccccgttcagcccgaccgctgcgccttatccggtaactatcgtcttgagtccaacccggtaagacacgacttatcgccactggcagcagccactggtaacaggattagcagagcgaggtatgtaggcggtgctacagagttcttgaagtggtggcctaactacggctacactagaagaacagtatttggtatctgcgctctgctgaagccagttaccttcggaaaaagagttggtagctcttgatccggcaaacaaaccaccgctggtagcggtggtttttttgtttgcaagcagcagattacgcgcagaaaaaaaggatctcaagaagatcctttgatcttttctacggggtctgacgctcagtggaacgaaaactcacgttaagggattttggtcatgagattatcaaaaaggatcttcacctagatccttttaaattaaaaatgaagttttaaatcaatctaaagtatatatgagtaaacttggtctgacagttaccaatgcttaatcagtgaggcacctatctcagcgatctgtctatttcgttcatccatagttgcctgactccccgtcgtgtagataactacgatacgggagcgcttaccatctggccccagtgctgcaatgataccgcgagacccacgctcaccggctccagatttatcagcaataaaccagccagccggaagggccgagcgcagaagtggtcctgcaactttatccgcctccattcagtctattaattgttgccgggaagctagagtaagtagttcgccagttaatagtttgcgcaacgttgttggcattgctacaggcatcgtggtgtcactctcgtcgtttggtatggcttcattcagctccggttcccaacgatcaaggcgagttacatgatcccccatgttgtgcaaaaaagcggttagctccttcggtcctccgatcgttgtcagaagtaagttggccgcagtgttatcactcatggttatggcagcactgcataattctcttactgtcatgccatccgtaagatgcttttctgtgactggtgagtactcaaccaagtcattctgagaatagtgtatgcggcgaccgagttgctcttgcccggcgtcaatacgggataatagtgtatcacatagcagaactttaaaagtgctcatcattggaaaacgttcttcggggcgaaaactctcaaggatcttaccgctgttgagatccagttcgatgtaacccactcgtgcacccaactgatcttcagcatcttttactttcaccagcgtttctgggtgagcaaaaacaggaaggcaaaatgccgcaaaaaagggaataagggcgacacggaaatgttgaatactcatactcttcctttttcaatgggtaataactgatataattaaattgaagctctaatttgtgagtttagtatacatgcatttacttataatacagttttttagttttgctggccgcatcttctcaaatatgcttcccagcctgcttttctgtaacgttcaccctctaccttagcatcccttccctttgcaaatagtcctcttccaacaataataatgtcagatcctgtagagaccacatcatccacggttctatactgttgacccaatgcgtctcccttgtcatctaaacccacaccgggtgtcataatcaaccaatcgtaaccttcatctcttccacccatgtctctttgagcaataaagccgataacaaaatctttgtcgctcttcgcaatgtcaacagtacccttagtatattctccagtagatagggagcccttgcatgacaattctgctaacatcaaaaggcctctaggttcctttgttacttcttctgccgcctgcttcaaaccgctaacaatacctgggcccaccacaccgtgtgcattcgtaatgtctgcccattctgctattctgtatacacccgcagagtactgcaatttgactgtattaccaatgtcagcaaattttctgtcttcg

SEQ ID NO: 24 - DNA, 7266 bp, Artificial Sequence
  OXC154-P2W/T26A/S60T
aagagtaaaaaattgtacttggcggataatgcctttagcggcttaactgtgccctccatggaaaaatcagtcaagatatccacatgtgtttttagtaaacaaattttgggacctaatgcttcaactaactccagtaattccttggtggtacgaacatccaatgaagcacacaagtttgtttgcttttcgtgcatgatattaaatagcttggcagcaacaggactaggatgagtagcagcacgttccttatatgtagctttcgacatgatttatcttcgtttcctgcaggtttttgttctgtgcagttgggttaagaatactgggcaatttcatgtttcttcaacactacatatgcgtatatataccaatctaagtctgtgctccttccttcgttcttccttctgttcggagattaccgaatcaaaaaaatttcaaagaaaccgaaatcaaaaaaaagaataaaaaaaaaatgatgaattgaattgaaaagctagcttatcgatgataagctgtcaaagatgagaattaattccacggactatagactatactagatactccgtctactgtacgatacacttccgctcaggtccttgtcctttaacgaggccttaccactcttttgttactctattgatccagctcagcaaaggcagtgtgatctaagattctatcttcgcgatgtagtaaaactagctagaccgagaaagagactagaaatgcaaaaggcacttctacaatggctgccatcattattatccgatgtgacgctgcagcttctcaatgatattcgaatacgctttgaggagatacagcctaatatccgacaaactgttttacagatttacgatcgtacttgttacccatcattgaattttgaacatccgaacctgggagttttccctgaaacagatagtatatttgaacctgtataataatatatagtctagcgctttacggaagacaatgtatgtatttcggttcctggagaaactattgcatctattgcataggtaatcttgcacgtcgcatccccggttcattttctgcgtttccatcttgcacttcaatagcatatctttgttcgcttgcctgtaacttacacgcgcctcgtatcttttaatgatggaataatttgggaatttactctgtgtttatttatttttatgttttgtatttggattttagaaagtaaataaagaaggtagaagagttacggaatgaagaaaaaaaaataaacaaaggtttaaaaaatttcaacaaaaagcgtactttacatatatatttattagacaagaaaagcagattaaatagatatacattcgattaacgataagtaaaatgtaaaatcacaggattttcgtgtgtggtcttctacacagacaagatgaaacaattcggcattaatacctgagagcaggaagagcaagataaaaggtagtatttgttggcgatccccctagagtcttttacatcttcggaaaacaaaaactattttttctttaatttctttttttactttctatttttaatttatatatttatattaaaaaatttaaattataattatttttatagcacgtgatgaaaaggaccgggaagctccaccccggttgataatcagaaaagccccaaaaacaggaagattgtataagcaaatatttaaattgtaaacgttaatattttgttaaaattcgcgttaaatttttgttaaatcagctcattttttaacgaatagcccgaaatcggcaaaatcccttataaatcaaaagaatagaccgagatagggttgagtgttgttccagtttccaacaagagtccactattaaagaacgtggactccaacgtcaaagggcgaaaaagggtctatcagggcgatggcccactacgtgaaccatcaccctaatcaagttttttggggtcgaggtgccgtaaagcagtaaatcggaagggtaaacggatgcccccatttagagcttgacggggaaagccggcgaacgtggcgagaaaggaagggaagaaagcgaaaggagcgggggctagggcggtgggaagtgtaggggtcacgctgggcgtaaccaccacacccgccgcgcttaatggggcgctacagggcgcgtggggatgatccactagtacggattagaagccgccgagcgggtgacagccctccgaaggaagactctcctccgtgcgtcctcgtcttcaccggtcgcgttcctgaaacgcagatgtgcctcgcgccgcactgctccgaacaataaagattctacaatactagcttttatggttatgaagaggaaaaattggcagtaacctggccccacaaaccttcaaatgaacgaatcaaattaacaaccataggatgataatgcgattagttttttagccttatttctggggtaattaatcagcgaagcgatgatttttgatctattaacagatatataaatgcaaaaactgcataaccactttaactaatactttcaacattttcggtttgtattacttcttattcaaatgtaataaaagtatcaacaaaaaattgttaatatacctctatactttaacgtcaaggagaaaaaaccccggatcggactactagcagctgtaatacgactcactatagggaatattaagcttaaacaatgaggcaggtttggttctcttggattgtgggattgttcctatgttttttcaacgtgtcttctgctgctccagtcaacactacaacagaagatgaaacggcacaaattccggctgaagctgtcatcggttactcagatttagaaggggatttcgatgttgctgttttgccattttccaacagcacaaataacgggttattgtttataaatactactattgccagcattgctgctaaagaagaaggggtatctctcgagaaaagagaggctgaagctatgtggagagaaaacttcttgaagtgcttctcccaatatatcccaaacaacgctactaacttaaagttagtttacgctcaaaacaatccattatacatgtctgtcttaaactctactattcataacttaagatttacttccgatactacccctaagccattggttatcgtcaccccaacgcacgtctcccatatccaaggtactatcttatgttctaagaaggttggtttgcaaatccgtactagatctggtggtcacgactctgaaggtatgtcctatatctctcaagtcccatttgtcattgttgacttaagaaatatgagatccattaaaattgatgttcattctcaaactgcttgggtcgaagctggtgccaccttgggtgaagtttactactgggtcaacgaaaaaaacgaaaacttatctttagctgccggttactgtccaaccgtctgtgctggtggtcatttcggtggtggtggttacggtccattgatgcgtaactacggtttagctgctgacaacattattgacgctcatttagttaatgttcacggtaaggttttggacagaaaatctatgggtgaagatttattttgggccttgagaggtggtggtgctgaatccttcggtatcatcgttgcctggaagattcgtttagttgctgtcccttctaagtccaccatgttctccgtcaagaaaatcatggaaattcatgagttggtcaaattggttaacaagtggcaaaacatcgcttacaagtatgacaaggatttgttgttaatgactcacttcatcacccgtaatatcaccgacaaccaaggtaagaacaaaactgctattcacacctacttctcctccgtttttttgggtggtgtcgactccttagtcgatttgatgaacaaatcctttccagaattgggtattaagaaaactgattgtagacaattgtcttggattgacaccattatcttctattctggtgtcgttaactacgacaccgacaactttaacaaggaaattttgttggatcgttctgctggtcaaaatggtgccttcaaaatcaaattggactacgtcaaaaagccaatcccagaatctgttttcgttcaaattttggaaaagttgtacgaagaagacattggtgccggtatgtatgctttgtatccatatggtggtatcatggacgaaatttccgaatctgccatcccattcccacacagagctggtattttatatgaattgtggtacatctgttcttgggaaaagcaagaagacaacgaaaagcatttaaactggattagaaacatttacaacttcatgaccccatacgtttctaagaacccaagattagcctatttgaactaccgtgacttagatattggtattaatgacccaaagaacccaaacaactatactcaagccagaatttggggtgaaaagtacttcggtaagaacttcgatagattagttaaggttaaaactttggtcgatccaaacaacttcttcagaaacgaacaatccatcccaccattgccaagacatcgtcacggccatcatcaccatcaccattagctcgagcatgcatctagagggccgcatcatgtaattagttatgtcacgcttacattcacgccctccccccacatccgctctaaccgaaaaggaaggagttagacaacctgaagtctaggtccctatttatttttttatagttatgttagtattaagaacgttatttatatttcaaatttttcttttttttctgtacagacgcgtgtacgcatgtaacattatactgaaaaccttgcttgagaaggttttgggacgctcgaaggctttaatttgcggccctgcattaatgaatcggccaacgcgcggggagaggcggtttgcgtattgggcgctcttccgcttcctcgctcactgactcgctgcgctcggtcgttcggctgcggcgagcggtatcagctcactcaaaggcggtaatacggttatccacagaatcaggggataacgcaggaaagaacatgtgagcaaaaggccagcaaaagcccaggaaccgtaaaaaggccgcgttgctggcgtttttccataggctccgcccccctgacgagcatcacaaaaatcgacgctcaagtcagaggtggcgaaacccgacaggactataaagataccaggcgtttccccctggaagctccctcgtgcgctctcctgttccgaccctgccgcttaccggatacctgtccgcctttctcccttcgggaagcgtggcgctttctcatagctcacgctgtaggtatctcagttcggtgtaggtcgttcgctccaagctgggctgtgtgcacgaaccccccgttcagcccgaccgctgcgccttatccggtaactatcgtcttgagtccaacccggtaagacacgacttatcgccactggcagcagccactggtaacaggattagcagagcgaggtatgtaggcggtgctacagagttcttgaagtggtggcctaactacggctacactagaagaacagtatttggtatctgcgctctgctgaagccagttaccttcggaaaaagagttggtagctcttgatccggcaaacaaaccaccgctggtagcggtggtttttttgtttgcaagcagcagattacgcgcagaaaaaaaggatctcaagaagatcctttgatcttttctacggggtctgacgctcagtggaacgaaaactcacgttaagggattttggtcatgagattatcaaaaaggatcttcacctagatccttttaaattaaaaatgaagttttaaatcaatctaaagtatatatgagtaaacttggtctgacagttaccaatgcttaatcagtgaggcacctatctcagcgatctgtctatttcgttcatccatagttgcctgactccccgtcgtgtagataactacgatacgggagcgcttaccatctggccccagtgctgcaatgataccgcgagacccacgctcaccggctccagatttatcagcaataaaccagccagccggaagggccgagcgcagaagtggtcctgcaactttatccgcctccattcagtctattaattgttgccgggaagctagagtaagtagttcgccagttaatagtttgcgcaacgttgttggcattgctacaggcatcgtggtgtcactctcgtcgtttggtatggcttcattcagctccggttcccaacgatcaaggcgagttacatgatcccccatgttgtgcaaaaaagcggttagctccttcggtcctccgatcgttgtcagaagtaagttggccgcagtgttatcactcatggttatggcagcactgcataattctcttactgtcatgccatccgtaagatgcttttctgtgactggtgagtactcaaccaagtcattctgagaatagtgtatgcggcgaccgagttgctcttgcccggcgtcaatacgggataatagtgtatcacatagcagaactttaaaagtgctcatcattggaaaacgttcttcggggcgaaaactctcaaggatcttaccgctgttgagatccagttcgatgtaacccactcgtgcacccaactgatcttcagcatcttttactttcaccagcgtttctgggtgagcaaaaacaggaaggcaaaatgccgcaaaaaagggaataagggcgacacggaaatgttgaatactcatactcttcctttttcaatgggtaataactgatataattaaattgaagctctaatttgtgagtttagtatacatgcatttacttataatacagttttttagttttgctggccgcatcttctcaaatatgcttcccagcctgcttttctgtaacgttcaccctctaccttagcatcccttccctttgcaaatagtcctcttccaacaataataatgtcagatcctgtagagaccacatcatccacggttctatactgttgacccaatgcgtctcccttgtcatctaaacccacaccgggtgtcataatcaaccaatcgtaaccttcatctcttccacccatgtctctttgagcaataaagccgataacaaaatctttgtcgctcttcgcaatgtcaacagtacccttagtatattctccagtagatagggagcccttgcatgacaattctgctaacatcaaaaggcctctaggttcctttgttacttcttctgccgcctgcttcaaaccgctaacaatacctgggcccaccacaccgtgtgcattcgtaatgtctgcccattctgctattctgtatacacccgcagagtactgcaatttgactgtattaccaatgtcagcaaattttctgtcttcg

SEQ ID NO: 25 - DNA, 7266 bp, Artificial Sequence
  OXC154-R3G(=GGG)/L21G/S60T/S88A(=GCC)/V97E
aagagtaaaaaattgtacttggcggataatgcctttagcggcttaactgtgccctccatggaaaaatcagtcaagatatccacatgtgtttttagtaaacaaattttgggacctaatgcttcaactaactccagtaattccttggtggtacgaacatccaatgaagcacacaagtttgtttgcttttcgtgcatgatattaaatagcttggcagcaacaggactaggatgagtagcagcacgttccttatatgtagctttcgacatgatttatcttcgtttcctgcaggtttttgttctgtgcagttgggttaagaatactgggcaatttcatgtttcttcaacactacatatgcgtatatataccaatctaagtctgtgctccttccttcgttcttccttctgttcggagattaccgaatcaaaaaaatttcaaagaaaccgaaatcaaaaaaaagaataaaaaaaaaatgatgaattgaattgaaaagctagcttatcgatgataagctgtcaaagatgagaattaattccacggactatagactatactagatactccgtctactgtacgatacacttccgctcaggtccttgtcctttaacgaggccttaccactcttttgttactctattgatccagctcagcaaaggcagtgtgatctaagattctatcttcgcgatgtagtaaaactagctagaccgagaaagagactagaaatgcaaaaggcacttctacaatggctgccatcattattatccgatgtgacgctgcagcttctcaatgatattcgaatacgctttgaggagatacagcctaatatccgacaaactgttttacagatttacgatcgtacttgttacccatcattgaattttgaacatccgaacctgggagttttccctgaaacagatagtatatttgaacctgtataataatatatagtctagcgctttacggaagacaatgtatgtatttcggttcctggagaaactattgcatctattgcataggtaatcttgcacgtcgcatccccggttcattttctgcgtttccatcttgcacttcaatagcatatctttgttcgcttgcctgtaacttacacgcgcctcgtatcttttaatgatggaataatttgggaatttactctgtgtttatttatttttatgttttgtatttggattttagaaagtaaataaagaaggtagaagagttacggaatgaagaaaaaaaaataaacaaaggtttaaaaaatttcaacaaaaagcgtactttacatatatatttattagacaagaaaagcagattaaatagatatacattcgattaacgataagtaaaatgtaaaatcacaggattttcgtgtgtggtcttctacacagacaagatgaaacaattcggcattaatacctgagagcaggaagagcaagataaaaggtagtatttgttggcgatccccctagagtcttttacatcttcggaaaacaaaaactattttttctttaatttctttttttactttctatttttaatttatatatttatattaaaaaatttaaattataattatttttatagcacgtgatgaaaaggaccgggaagctccaccccggttgataatcagaaaagccccaaaaacaggaagattgtataagcaaatatttaaattgtaaacgttaatattttgttaaaattcgcgttaaatttttgttaaatcagctcattttttaacgaatagcccgaaatcggcaaaatcccttataaatcaaaagaatagaccgagatagggttgagtgttgttccagtttccaacaagagtccactattaaagaacgtggactccaacgtcaaagggcgaaaaagggtctatcagggcgatggcccactacgtgaaccatcaccctaatcaagttttttggggtcgaggtgccgtaaagcagtaaatcggaagggtaaacggatgcccccatttagagcttgacggggaaagccggcgaacgtggcgagaaaggaagggaagaaagcgaaaggagcgggggctagggcggtgggaagtgtaggggtcacgctgggcgtaaccaccacacccgccgcgcttaatggggcgctacagggcgcgtggggatgatccactagtacggattagaagccgccgagcgggtgacagccctccgaaggaagactctcctccgtgcgtcctcgtcttcaccggtcgcgttcctgaaacgcagatgtgcctcgcgccgcactgctccgaacaataaagattctacaatactagcttttatggttatgaagaggaaaaattggcagtaacctggccccacaaaccttcaaatgaacgaatcaaattaacaaccataggatgataatgcgattagttttttagccttatttctggggtaattaatcagcgaagcgatgatttttgatctattaacagatatataaatgcaaaaactgcataaccactttaactaatactttcaacattttcggtttgtattacttcttattcaaatgtaataaaagtatcaacaaaaaattgttaatatacctctatactttaacgtcaaggagaaaaaaccccggatcggactactagcagctgtaatacgactcactatagggaatattaagcttaaacaatgaggcaggtttggttctcttggattgtgggattgttcctatgttttttcaacgtgtcttctgctgctccagtcaacactacaacagaagatgaaacggcacaaattccggctgaagctgtcatcggttactcagatttagaaggggatttcgatgttgctgttttgccattttccaacagcacaaataacgggttattgtttataaatactactattgccagcattgctgctaaagaagaaggggtatctctcgagaaaagagaggctgaagctatgccaggggaaaacttcttgaagtgcttctcccaatatatcccaaacaacgctactaacgggaagttagtttacactcaaaacaatccattatacatgtctgtcttaaactctactattcataacttaagatttacttccgatactacccctaagccattggttatcgtcaccccaacgcacgtctcccatatccaaggtactatcttatgttctaagaaggttggtttgcaaatccgtactagatctggtggtcacgacgccgaaggtatgtcctatatctctcaagagccatttgtcattgttgacttaagaaatatgagatccattaaaattgatgttcattctcaaactgcttgggtcgaagctggtgccaccttgggtgaagtttactactgggtcaacgaaaaaaacgaaaacttatctttagctgccggttactgtccaaccgtctgtgctggtggtcatttcggtggtggtggttacggtccattgatgcgtaactacggtttagctgctgacaacattattgacgctcatttagttaatgttcacggtaaggttttggacagaaaatctatgggtgaagatttattttgggccttgagaggtggtggtgctgaatccttcggtatcatcgttgcctggaagattcgtttagttgctgtcccttctaagtccaccatgttctccgtcaagaaaatcatggaaattcatgagttggtcaaattggttaacaagtggcaaaacatcgcttacaagtatgacaaggatttgttgttaatgactcacttcatcacccgtaatatcaccgacaaccaaggtaagaacaaaactgctattcacacctacttctcctccgtttttttgggtggtgtcgactccttagtcgatttgatgaacaaatcctttccagaattgggtattaagaaaactgattgtagacaattgtcttggattgacaccattatcttctattctggtgtcgttaactacgacaccgacaactttaacaaggaaattttgttggatcgttctgctggtcaaaatggtgccttcaaaatcaaattggactacgtcaaaaagccaatcccagaatctgttttcgttcaaattttggaaaagttgtacgaagaagacattggtgccggtatgtatgctttgtatccatatggtggtatcatggacgaaatttccgaatctgccatcccattcccacacagagctggtattttatatgaattgtggtacatctgttcttgggaaaagcaagaagacaacgaaaagcatttaaactggattagaaacatttacaacttcatgaccccatacgtttctaagaacccaagattagcctatttgaactaccgtgacttagatattggtattaatgacccaaagaacccaaacaactatactcaagccagaatttggggtgaaaagtacttcggtaagaacttcgatagattagttaaggttaaaactttggtcgatccaaacaacttcttcagaaacgaacaatccatcccaccattgccaagacatcgtcacggccatcatcaccatcaccattagctcgagcatgcatctagagggccgcatcatgtaattagttatgtcacgcttacattcacgccctccccccacatccgctctaaccgaaaaggaaggagttagacaacctgaagtctaggtccctatttatttttttatagttatgttagtattaagaacgttatttatatttcaaatttttcttttttttctgtacagacgcgtgtacgcatgtaacattatactgaaaaccttgcttgagaaggttttgggacgctcgaaggctttaatttgcggccctgcattaatgaatcggccaacgcgcggggagaggcggtttgcgtattgggcgctcttccgcttcctcgctcactgactcgctgcgctcggtcgttcggctgcggcgagcggtatcagctcactcaaaggcggtaatacggttatccacagaatcaggggataacgcaggaaagaacatgtgagcaaaaggccagcaaaagcccaggaaccgtaaaaaggccgcgttgctggcgtttttccataggctccgcccccctgacgagcatcacaaaaatcgacgctcaagtcagaggtggcgaaacccgacaggactataaagataccaggcgtttccccctggaagctccctcgtgcgctctcctgttccgaccctgccgcttaccggatacctgtccgcctttctcccttcgggaagcgtggcgctttctcatagctcacgctgtaggtatctcagttcggtgtaggtcgttcgctccaagctgggctgtgtgcacgaaccccccgttcagcccgaccgctgcgccttatccggtaactatcgtcttgagtccaacccggtaagacacgacttatcgccactggcagcagccactggtaacaggattagcagagcgaggtatgtaggcggtgctacagagttcttgaagtggtggcctaactacggctacactagaagaacagtatttggtatctgcgctctgctgaagccagttaccttcggaaaaagagttggtagctcttgatccggcaaacaaaccaccgctggtagcggtggtttttttgtttgcaagcagcagattacgcgcagaaaaaaaggatctcaagaagatcctttgatcttttctacggggtctgacgctcagtggaacgaaaactcacgttaagggattttggtcatgagattatcaaaaaggatcttcacctagatccttttaaattaaaaatgaagttttaaatcaatctaaagtatatatgagtaaacttggtctgacagttaccaatgcttaatcagtgaggcacctatctcagcgatctgtctatttcgttcatccatagttgcctgactccccgtcgtgtagataactacgatacgggagcgcttaccatctggccccagtgctgcaatgataccgcgagacccacgctcaccggctccagatttatcagcaataaaccagccagccggaagggccgagcgcagaagtggtcctgcaactttatccgcctccattcagtctattaattgttgccgggaagctagagtaagtagttcgccagttaatagtttgcgcaacgttgttggcattgctacaggcatcgtggtgtcactctcgtcgtttggtatggcttcattcagctccggttcccaacgatcaaggcgagttacatgatcccccatgttgtgcaaaaaagcggttagctccttcggtcctccgatcgttgtcagaagtaagttggccgcagtgttatcactcatggttatggcagcactgcataattctcttactgtcatgccatccgtaagatgcttttctgtgactggtgagtactcaaccaagtcattctgagaatagtgtatgcggcgaccgagttgctcttgcccggcgtcaatacgggataatagtgtatcacatagcagaactttaaaagtgctcatcattggaaaacgttcttcggggcgaaaactctcaaggatcttaccgctgttgagatccagttcgatgtaacccactcgtgcacccaactgatcttcagcatcttttactttcaccagcgtttctgggtgagcaaaaacaggaaggcaaaatgccgcaaaaaagggaataagggcgacacggaaatgttgaatactcatactcttcctttttcaatgggtaataactgatataattaaattgaagctctaatttgtgagtttagtatacatgcatttacttataatacagttttttagttttgctggccgcatcttctcaaatatgcttcccagcctgcttttctgtaacgttcaccctctaccttagcatcccttccctttgcaaatagtcctcttccaacaataataatgtcagatcctgtagagaccacatcatccacggttctatactgttgacccaatgcgtctcccttgtcatctaaacccacaccgggtgtcataatcaaccaatcgtaaccttcatctcttccacccatgtctctttgagcaataaagccgataacaaaatctttgtcgctcttcgcaatgtcaacagtacccttagtatattctccagtagatagggagcccttgcatgacaattctgctaacatcaaaaggcctctaggttcctttgttacttcttctgccgcctgcttcaaaccgctaacaatacctgggcccaccacaccgtgtgcattcgtaatgtctgcccattctgctattctgtatacacccgcagagtactgcaatttgactgtattaccaatgtcagcaaattttctgtcttcg

SEQ ID NO: 26 - DNA, 7266 bp, Artificial Sequence
  OXC154-R3G(=GGG)/A18E/T49R/S88A(=GCC)
aagagtaaaaaattgtacttggcggataatgcctttagcggcttaactgtgccctccatggaaaaatcagtcaagatatccacatgtgtttttagtaaacaaattttgggacctaatgcttcaactaactccagtaattccttggtggtacgaacatccaatgaagcacacaagtttgtttgcttttcgtgcatgatattaaatagcttggcagcaacaggactaggatgagtagcagcacgttccttatatgtagctttcgacatgatttatcttcgtttcctgcaggtttttgttctgtgcagttgggttaagaatactgggcaatttcatgtttcttcaacactacatatgcgtatatataccaatctaagtctgtgctccttccttcgttcttccttctgttcggagattaccgaatcaaaaaaatttcaaagaaaccgaaatcaaaaaaaagaataaaaaaaaaatgatgaattgaattgaaaagctagcttatcgatgataagctgtcaaagatgagaattaattccacggactatagactatactagatactccgtctactgtacgatacacttccgctcaggtccttgtcctttaacgaggccttaccactcttttgttactctattgatccagctcagcaaaggcagtgtgatctaagattctatcttcgcgatgtagtaaaactagctagaccgagaaagagactagaaatgcaaaaggcacttctacaatggctgccatcattattatccgatgtgacgctgcagcttctcaatgatattcgaatacgctttgaggagatacagcctaatatccgacaaactgttttacagatttacgatcgtacttgttacccatcattgaattttgaacatccgaacctgggagttttccctgaaacagatagtatatttgaacctgtataataatatatagtctagcgctttacggaagacaatgtatgtatttcggttcctggagaaactattgcatctattgcataggtaatcttgcacgtcgcatccccggttcattttctgcgtttccatcttgcacttcaatagcatatctttgttcgcttgcctgtaacttacacgcgcctcgtatcttttaatgatggaataatttgggaatttactctgtgtttatttatttttatgttttgtatttggattttagaaagtaaataaagaaggtagaagagttacggaatgaagaaaaaaaaataaacaaaggtttaaaaaatttcaacaaaaagcgtactttacatatatatttattagacaagaaaagcagattaaatagatatacattcgattaacgataagtaaaatgtaaaatcacaggattttcgtgtgtggtcttctacacagacaagatgaaacaattcggcattaatacctgagagcaggaagagcaagataaaaggtagtatttgttggcgatccccctagagtcttttacatcttcggaaaacaaaaactattttttctttaatttctttttttactttctatttttaatttatatatttatattaaaaaatttaaattataattatttttatagcacgtgatgaaaaggaccgggaagctccaccccggttgataatcagaaaagccccaaaaacaggaagattgtataagcaaatatttaaattgtaaacgttaatattttgttaaaattcgcgttaaatttttgttaaatcagctcattttttaacgaatagcccgaaatcggcaaaatcccttataaatcaaaagaatagaccgagatagggttgagtgttgttccagtttccaacaagagtccactattaaagaacgtggactccaacgtcaaagggcgaaaaagggtctatcagggcgatggcccactacgtgaaccatcaccctaatcaagttttttggggtcgaggtgccgtaaagcagtaaatcggaagggtaaacggatgcccccatttagagcttgacggggaaagccggcgaacgtggcgagaaaggaagggaagaaagcgaaaggagcgggggctagggcggtgggaagtgtaggggtcacgctgggcgtaaccaccacacccgccgcgcttaatggggcgctacagggcgcgtggggatgatccactagtacggattagaagccgccgagcgggtgacagccctccgaaggaagactctcctccgtgcgtcctcgtcttcaccggtcgcgttcctgaaacgcagatgtgcctcgcgccgcactgctccgaacaataaagattctacaatactagcttttatggttatgaagaggaaaaattggcagtaacctggccccacaaaccttcaaatgaacgaatcaaattaacaaccataggatgataatgcgattagttttttagccttatttctggggtaattaatcagcgaagcgatgatttttgatctattaacagatatataaatgcaaaaactgcataaccactttaactaatactttcaacattttcggtttgtattacttcttattcaaatgtaataaaagtatcaacaaaaaattgttaatatacctctatactttaacgtcaaggagaaaaaaccccggatcggactactagcagctgtaatacgactcactatagggaatattaagcttaaacaatgaggcaggtttggttctcttggattgtgggattgttcctatgttttttcaacgtgtcttctgctgctccagtcaacactacaacagaagatgaaacggcacaaattccggctgaagctgtcatcggttactcagatttagaaggggatttcgatgttgctgttttgccattttccaacagcacaaataacgggttattgtttataaatactactattgccagcattgctgctaaagaagaaggggtatctctcgagaaaagagaggctgaagctatgccaggggaaaacttcttgaagtgcttctcccaatatatcccaaacaacgagactaacttaaagttagtttacactcaaaacaatccattatacatgtctgtcttaaactctactattcataacttaagatttacttccgatcggacccctaagccattggttatcgtcaccccatctcacgtctcccatatccaaggtactatcttatgttctaagaaggttggtttgcaaatccgtactagatctggtggtcacgacgccgaaggtatgtcctatatctctcaagtcccatttgtcattgttgacttaagaaatatgagatccattaaaattgatgttcattctcaaactgcttgggtcgaagctggtgccaccttgggtgaagtttactactgggtcaacgaaaaaaacgaaaacttatctttagctgccggttactgtccaaccgtctgtgctggtggtcatttcggtggtggtggttacggtccattgatgcgtaactacggtttagctgctgacaacattattgacgctcatttagttaatgttcacggtaaggttttggacagaaaatctatgggtgaagatttattttgggccttgagaggtggtggtgctgaatccttcggtatcatcgttgcctggaagattcgtttagttgctgtcccttctaagtccaccatgttctccgtcaagaaaatcatggaaattcatgagttggtcaaattggttaacaagtggcaaaacatcgcttacaagtatgacaaggatttgttgttaatgactcacttcatcacccgtaatatcaccgacaaccaaggtaagaacaaaactgctattcacacctacttctcctccgtttttttgggtggtgtcgactccttagtcgatttgatgaacaaatcctttccagaattgggtattaagaaaactgattgtagacaattgtcttggattgacaccattatcttctattctggtgtcgttaactacgacaccgacaactttaacaaggaaattttgttggatcgttctgctggtcaaaatggtgccttcaaaatcaaattggactacgtcaaaaagccaatcccagaatctgttttcgttcaaattttggaaaagttgtacgaagaagacattggtgccggtatgtatgctttgtatccatatggtggtatcatggacgaaatttccgaatctgccatcccattcccacacagagctggtattttatatgaattgtggtacatctgttcttgggaaaagcaagaagacaacgaaaagcatttaaactggattagaaacatttacaacttcatgaccccatacgtttctaagaacccaagattagcctatttgaactaccgtgacttagatattggtattaatgacccaaagaacccaaacaactatactcaagccagaatttggggtgaaaagtacttcggtaagaacttcgatagattagttaaggttaaaactttggtcgatccaaacaacttcttcagaaacgaacaatccatcccaccattgccaagacatcgtcacggccatcatcaccatcaccattagctcgagcatgcatctagagggccgcatcatgtaattagttatgtcacgcttacattcacgccctccccccacatccgctctaaccgaaaaggaaggagttagacaacctgaagtctaggtccctatttatttttttatagttatgttagtattaagaacgttatttatatttcaaatttttcttttttttctgtacagacgcgtgtacgcatgtaacattatactgaaaaccttgcttgagaaggttttgggacgctcgaaggctttaatttgcggccctgcattaatgaatcggccaacgcgcggggagaggcggtttgcgtattgggcgctcttccgcttcctcgctcactgactcgctgcgctcggtcgttcggctgcggcgagcggtatcagctcactcaaaggcggtaatacggttatccacagaatcaggggataacgcaggaaagaacatgtgagcaaaaggccagcaaaagcccaggaaccgtaaaaaggccgcgttgctggcgtttttccataggctccgcccccctgacgagcatcacaaaaatcgacgctcaagtcagaggtggcgaaacccgacaggactataaagataccaggcgtttccccctggaagctccctcgtgcgctctcctgttccgaccctgccgcttaccggatacctgtccgcctttctcccttcgggaagcgtggcgctttctcatagctcacgctgtaggtatctcagttcggtgtaggtcgttcgctccaagctgggctgtgtgcacgaaccccccgttcagcccgaccgctgcgccttatccggtaactatcgtcttgagtccaacccggtaagacacgacttatcgccactggcagcagccactggtaacaggattagcagagcgaggtatgtaggcggtgctacagagttcttgaagtggtggcctaactacggctacactagaagaacagtatttggtatctgcgctctgctgaagccagttaccttcggaaaaagagttggtagctcttgatccggcaaacaaaccaccgctggtagcggtggtttttttgtttgcaagcagcagattacgcgcagaaaaaaaggatctcaagaagatcctttgatcttttctacggggtctgacgctcagtggaacgaaaactcacgttaagggattttggtcatgagattatcaaaaaggatcttcacctagatccttttaaattaaaaatgaagttttaaatcaatctaaagtatatatgagtaaacttggtctgacagttaccaatgcttaatcagtgaggcacctatctcagcgatctgtctatttcgttcatccatagttgcctgactccccgtcgtgtagataactacgatacgggagcgcttaccatctggccccagtgctgcaatgataccgcgagacccacgctcaccggctccagatttatcagcaataaaccagccagccggaagggccgagcgcagaagtggtcctgcaactttatccgcctccattcagtctattaattgttgccgggaagctagagtaagtagttcgccagttaatagtttgcgcaacgttgttggcattgctacaggcatcgtggtgtcactctcgtcgtttggtatggcttcattcagctccggttcccaacgatcaaggcgagttacatgatcccccatgttgtgcaaaaaagcggttagctccttcggtcctccgatcgttgtcagaagtaagttggccgcagtgttatcactcatggttatggcagcactgcataattctcttactgtcatgccatccgtaagatgcttttctgtgactggtgagtactcaaccaagtcattctgagaatagtgtatgcggcgaccgagttgctcttgcccggcgtcaatacgggataatagtgtatcacatagcagaactttaaaagtgctcatcattggaaaacgttcttcggggcgaaaactctcaaggatcttaccgctgttgagatccagttcgatgtaacccactcgtgcacccaactgatcttcagcatcttttactttcaccagcgtttctgggtgagcaaaaacaggaaggcaaaatgccgcaaaaaagggaataagggcgacacggaaatgttgaatactcatactcttcctttttcaatgggtaataactgatataattaaattgaagctctaatttgtgagtttagtatacatgcatttacttataatacagttttttagttttgctggccgcatcttctcaaatatgcttcccagcctgcttttctgtaacgttcaccctctaccttagcatcccttccctttgcaaatagtcctcttccaacaataataatgtcagatcctgtagagaccacatcatccacggttctatactgttgacccaatgcgtctcccttgtcatctaaacccacaccgggtgtcataatcaaccaatcgtaaccttcatctcttccacccatgtctctttgagcaataaagccgataacaaaatctttgtcgctcttcgcaatgtcaacagtacccttagtatattctccagtagatagggagcccttgcatgacaattctgctaacatcaaaaggcctctaggttcctttgttacttcttctgccgcctgcttcaaaccgctaacaatacctgggcccaccacaccgtgtgcattcgtaatgtctgcccattctgctattctgtatacacccgcagagtactgcaatttgactgtattaccaatgtcagcaaattttctgtcttcg

SEQ ID NO: 27 - DNA, 7266 bp, Artificial Sequence
  OXC154-R3T/L21G/S60T/S88A(=GCC)/V97D
aagagtaaaaaattgtacttggcggataatgcctttagcggcttaactgtgccctccatggaaaaatcagtcaagatatccacatgtgtttttagtaaacaaattttgggacctaatgcttcaactaactccagtaattccttggtggtacgaacatccaatgaagcacacaagtttgtttgcttttcgtgcatgatattaaatagcttggcagcaacaggactaggatgagtagcagcacgttccttatatgtagctttcgacatgatttatcttcgtttcctgcaggtttttgttctgtgcagttgggttaagaatactgggcaatttcatgtttcttcaacactacatatgcgtatatataccaatctaagtctgtgctccttccttcgttcttccttctgttcggagattaccgaatcaaaaaaatttcaaagaaaccgaaatcaaaaaaaagaataaaaaaaaaatgatgaattgaattgaaaagctagcttatcgatgataagctgtcaaagatgagaattaattccacggactatagactatactagatactccgtctactgtacgatacacttccgctcaggtccttgtcctttaacgaggccttaccactcttttgttactctattgatccagctcagcaaaggcagtgtgatctaagattctatcttcgcgatgtagtaaaactagctagaccgagaaagagactagaaatgcaaaaggcacttctacaatggctgccatcattattatccgatgtgacgctgcagcttctcaatgatattcgaatacgctttgaggagatacagcctaatatccgacaaactgttttacagatttacgatcgtacttgttacccatcattgaattttgaacatccgaacctgggagttttccctgaaacagatagtatatttgaacctgtataataatatatagtctagcgctttacggaagacaatgtatgtatttcggttcctggagaaactattgcatctattgcataggtaatcttgcacgtcgcatccccggttcattttctgcgtttccatcttgcacttcaatagcatatctttgttcgcttgcctgtaacttacacgcgcctcgtatcttttaatgatggaataatttgggaatttactctgtgtttatttatttttatgttttgtatttggattttagaaagtaaataaagaaggtagaagagttacggaatgaagaaaaaaaaataaacaaaggtttaaaaaatttcaacaaaaagcgtactttacatatatatttattagacaagaaaagcagattaaatagatatacattcgattaacgataagtaaaatgtaaaatcacaggattttcgtgtgtggtcttctacacagacaagatgaaacaattcggcattaatacctgagagcaggaagagcaagataaaaggtagtatttgttggcgatccccctagagtcttttacatcttcggaaaacaaaaactattttttctttaatttctttttttactttctatttttaatttatatatttatattaaaaaatttaaattataattatttttatagcacgtgatgaaaaggaccgggaagctccaccccggttgataatcagaaaagccccaaaaacaggaagattgtataagcaaatatttaaattgtaaacgttaatattttgttaaaattcgcgttaaatttttgttaaatcagctcattttttaacgaatagcccgaaatcggcaaaatcccttataaatcaaaagaatagaccgagatagggttgagtgttgttccagtttccaacaagagtccactattaaagaacgtggactccaacgtcaaagggcgaaaaagggtctatcagggcgatggcccactacgtgaaccatcaccctaatcaagttttttggggtcgaggtgccgtaaagcagtaaatcggaagggtaaacggatgcccccatttagagcttgacggggaaagccggcgaacgtggcgagaaaggaagggaagaaagcgaaaggagcgggggctagggcggtgggaagtgtaggggtcacgctgggcgtaaccaccacacccgccgcgcttaatggggcgctacagggcgcgtggggatgatccactagtacggattagaagccgccgagcgggtgacagccctccgaaggaagactctcctccgtgcgtcctcgtcttcaccggtcgcgttcctgaaacgcagatgtgcctcgcgccgcactgctccgaacaataaagattctacaatactagcttttatggttatgaagaggaaaaattggcagtaacctggccccacaaaccttcaaatgaacgaatcaaattaacaaccataggatgataatgcgattagttttttagccttatttctggggtaattaatcagcgaagcgatgatttttgatctattaacagatatataaatgcaaaaactgcataaccactttaactaatactttcaacattttcggtttgtattacttcttattcaaatgtaataaaagtatcaacaaaaaattgttaatatacctctatactttaacgtcaaggagaaaaaaccccggatcggactactagcagctgtaatacgactcactatagggaatattaagcttaaacaatgaggcaggtttggttctcttggattgtgggattgttcctatgttttttcaacgtgtcttctgctgctccagtcaacactacaacagaagatgaaacggcacaaattccggctgaagctgtcatcggttactcagatttagaaggggatttcgatgttgctgttttgccattttccaacagcacaaataacgggttattgtttataaatactactattgccagcattgctgctaaagaagaaggggtatctctcgagaaaagagaggctgaagctatgccaacggaaaacttcttgaagtgcttctcccaatatatcccaaacaacgctactaacgggaagttagtttacactcaaaacaatccattatacatgtctgtcttaaactctactattcataacttaagatttacttccgatactacccctaagccattggttatcgtcaccccaacgcacgtctcccatatccaaggtactatcttatgttctaagaaggttggtttgcaaatccgtactagatctggtggtcacgacgccgaaggtatgtcctatatctctcaagacccatttgtcattgttgacttaagaaatatgagatccattaaaattgatgttcattctcaaactgcttgggtcgaagctggtgccaccttgggtgaagtttactactgggtcaacgaaaaaaacgaaaacttatctttagctgccggttactgtccaaccgtctgtgctggtggtcatttcggtggtggtggttacggtccattgatgcgtaactacggtttagctgctgacaacattattgacgctcatttagttaatgttcacggtaaggttttggacagaaaatctatgggtgaagatttattttgggccttgagaggtggtggtgctgaatccttcggtatcatcgttgcctggaagattcgtttagttgctgtcccttctaagtccaccatgttctccgtcaagaaaatcatggaaattcatgagttggtcaaattggttaacaagtggcaaaacatcgcttacaagtatgacaaggatttgttgttaatgactcacttcatcacccgtaatatcaccgacaaccaaggtaagaacaaaactgctattcacacctacttctcctccgtttttttgggtggtgtcgactccttagtcgatttgatgaacaaatcctttccagaattgggtattaagaaaactgattgtagacaattgtcttggattgacaccattatcttctattctggtgtcgttaactacgacaccgacaactttaacaaggaaattttgttggatcgttctgctggtcaaaatggtgccttcaaaatcaaattggactacgtcaaaaagccaatcccagaatctgttttcgttcaaattttggaaaagttgtacgaagaagacattggtgccggtatgtatgctttgtatccatatggtggtatcatggacgaaatttccgaatctgccatcccattcccacacagagctggtattttatatgaattgtggtacatctgttcttgggaaaagcaagaagacaacgaaaagcatttaaactggattagaaacatttacaacttcatgaccccatacgtttctaagaacccaagattagcctatttgaactaccgtgacttagatattggtattaatgacccaaagaacccaaacaactatactcaagccagaatttggggtgaaaagtacttcggtaagaacttcgatagattagttaaggttaaaactttggtcgatccaaacaacttcttcagaaacgaacaatccatcccaccattgccaagacatcgtcacggccatcatcaccatcaccattagctcgagcatgcatctagagggccgcatcatgtaattagttatgtcacgcttacattcacgccctccccccacatccgctctaaccgaaaaggaaggagttagacaacctgaagtctaggtccctatttatttttttatagttatgttagtattaagaacgttatttatatttcaaatttttcttttttttctgtacagacgcgtgtacgcatgtaacattatactgaaaaccttgcttgagaaggttttgggacgctcgaaggctttaatttgcggccctgcattaatgaatcggccaacgcgcggggagaggcggtttgcgtattgggcgctcttccgcttcctcgctcactgactcgctgcgctcggtcgttcggctgcggcgagcggtatcagctcactcaaaggcggtaatacggttatccacagaatcaggggataacgcaggaaagaacatgtgagcaaaaggccagcaaaagcccaggaaccgtaaaaaggccgcgttgctggcgtttttccataggctccgcccccctgacgagcatcacaaaaatcgacgctcaagtcagaggtggcgaaacccgacaggactataaagataccaggcgtttccccctggaagctccctcgtgcgctctcctgttccgaccctgccgcttaccggatacctgtccgcctttctcccttcgggaagcgtggcgctttctcatagctcacgctgtaggtatctcagttcggtgtaggtcgttcgctccaagctgggctgtgtgcacgaaccccccgttcagcccgaccgctgcgccttatccggtaactatcgtcttgagtccaacccggtaagacacgacttatcgccactggcagcagccactggtaacaggattagcagagcgaggtatgtaggcggtgctacagagttcttgaagtggtggcctaactacggctacactagaagaacagtatttggtatctgcgctctgctgaagccagttaccttcggaaaaagagttggtagctcttgatccggcaaacaaaccaccgctggtagcggtggtttttttgtttgcaagcagcagattacgcgcagaaaaaaaggatctcaagaagatcctttgatcttttctacggggtctgacgctcagtggaacgaaaactcacgttaagggattttggtcatgagattatcaaaaaggatcttcacctagatccttttaaattaaaaatgaagttttaaatcaatctaaagtatatatgagtaaacttggtctgacagttaccaatgcttaatcagtgaggcacctatctcagcgatctgtctatttcgttcatccatagttgcctgactccccgtcgtgtagataactacgatacgggagcgcttaccatctggccccagtgctgcaatgataccgcgagacccacgctcaccggctccagatttatcagcaataaaccagccagccggaagggccgagcgcagaagtggtcctgcaactttatccgcctccattcagtctattaattgttgccgggaagctagagtaagtagttcgccagttaatagtttgcgcaacgttgttggcattgctacaggcatcgtggtgtcactctcgtcgtttggtatggcttcattcagctccggttcccaacgatcaaggcgagttacatgatcccccatgttgtgcaaaaaagcggttagctccttcggtcctccgatcgttgtcagaagtaagttggccgcagtgttatcactcatggttatggcagcactgcataattctcttactgtcatgccatccgtaagatgcttttctgtgactggtgagtactcaaccaagtcattctgagaatagtgtatgcggcgaccgagttgctcttgcccggcgtcaatacgggataatagtgtatcacatagcagaactttaaaagtgctcatcattggaaaacgttcttcggggcgaaaactctcaaggatcttaccgctgttgagatccagttcgatgtaacccactcgtgcacccaactgatcttcagcatcttttactttcaccagcgtttctgggtgagcaaaaacaggaaggcaaaatgccgcaaaaaagggaataagggcgacacggaaatgttgaatactcatactcttcctttttcaatgggtaataactgatataattaaattgaagctctaatttgtgagtttagtatacatgcatttacttataatacagttttttagttttgctggccgcatcttctcaaatatgcttcccagcctgcttttctgtaacgttcaccctctaccttagcatcccttccctttgcaaatagtcctcttccaacaataataatgtcagatcctgtagagaccacatcatccacggttctatactgttgacccaatgcgtctcccttgtcatctaaacccacaccgggtgtcataatcaaccaatcgtaaccttcatctcttccacccatgtctctttgagcaataaagccgataacaaaatctttgtcgctcttcgcaatgtcaacagtacccttagtatattctccagtagatagggagcccttgcatgacaattctgctaacatcaaaaggcctctaggttcctttgttacttcttctgccgcctgcttcaaaccgctaacaatacctgggcccaccacaccgtgtgcattcgtaatgtctgcccattctgctattctgtatacacccgcagagtactgcaatttgactgtattaccaatgtcagcaaattttctgtcttcg

SEQ ID NO: 28 - DNA, 7266 bp, Artificial Sequence
  OXC154-P2W/L21G/T49R/S88A(=GCC)/V97E
aagagtaaaaaattgtacttggcggataatgcctttagcggcttaactgtgccctccatggaaaaatcagtcaagatatccacatgtgtttttagtaaacaaattttgggacctaatgcttcaactaactccagtaattccttggtggtacgaacatccaatgaagcacacaagtttgtttgcttttcgtgcatgatattaaatagcttggcagcaacaggactaggatgagtagcagcacgttccttatatgtagctttcgacatgatttatcttcgtttcctgcaggtttttgttctgtgcagttgggttaagaatactgggcaatttcatgtttcttcaacactacatatgcgtatatataccaatctaagtctgtgctccttccttcgttcttccttctgttcggagattaccgaatcaaaaaaatttcaaagaaaccgaaatcaaaaaaaagaataaaaaaaaaatgatgaattgaattgaaaagctagcttatcgatgataagctgtcaaagatgagaattaattccacggactatagactatactagatactccgtctactgtacgatacacttccgctcaggtccttgtcctttaacgaggccttaccactcttttgttactctattgatccagctcagcaaaggcagtgtgatctaagattctatcttcgcgatgtagtaaaactagctagaccgagaaagagactagaaatgcaaaaggcacttctacaatggctgccatcattattatccgatgtgacgctgcagcttctcaatgatattcgaatacgctttgaggagatacagcctaatatccgacaaactgttttacagatttacgatcgtacttgttacccatcattgaattttgaacatccgaacctgggagttttccctgaaacagatagtatatttgaacctgtataataatatatagtctagcgctttacggaagacaatgtatgtatttcggttcctggagaaactattgcatctattgcataggtaatcttgcacgtcgcatccccggttcattttctgcgtttccatcttgcacttcaatagcatatctttgttcgcttgcctgtaacttacacgcgcctcgtatcttttaatgatggaataatttgggaatttactctgtgtttatttatttttatgttttgtatttggattttagaaagtaaataaagaaggtagaagagttacggaatgaagaaaaaaaaataaacaaaggtttaaaaaatttcaacaaaaagcgtactttacatatatatttattagacaagaaaagcagattaaatagatatacattcgattaacgataagtaaaatgtaaaatcacaggattttcgtgtgtggtcttctacacagacaagatgaaacaattcggcattaatacctgagagcaggaagagcaagataaaaggtagtatttgttggcgatccccctagagtcttttacatcttcggaaaacaaaaactattttttctttaatttctttttttactttctatttttaatttatatatttatattaaaaaatttaaattataattatttttatagcacgtgatgaaaaggaccgggaagctccaccccggttgataatcagaaaagccccaaaaacaggaagattgtataagcaaatatttaaattgtaaacgttaatattttgttaaaattcgcgttaaatttttgttaaatcagctcattttttaacgaatagcccgaaatcggcaaaatcccttataaatcaaaagaatagaccgagatagggttgagtgttgttccagtttccaacaagagtccactattaaagaacgtggactccaacgtcaaagggcgaaaaagggtctatcagggcgatggcccactacgtgaaccatcaccctaatcaagttttttggggtcgaggtgccgtaaagcagtaaatcggaagggtaaacggatgcccccatttagagcttgacggggaaagccggcgaacgtggcgagaaaggaagggaagaaagcgaaaggagcgggggctagggcggtgggaagtgtaggggtcacgctgggcgtaaccaccacacccgccgcgcttaatggggcgctacagggcgcgtggggatgatccactagtacggattagaagccgccgagcgggtgacagccctccgaaggaagactctcctccgtgcgtcctcgtcttcaccggtcgcgttcctgaaacgcagatgtgcctcgcgccgcactgctccgaacaataaagattctacaatactagcttttatggttatgaagaggaaaaattggcagtaacctggccccacaaaccttcaaatgaacgaatcaaattaacaaccataggatgataatgcgattagttttttagccttatttctggggtaattaatcagcgaagcgatgatttttgatctattaacagatatataaatgcaaaaactgcataaccactttaactaatactttcaacattttcggtttgtattacttcttattcaaatgtaataaaagtatcaacaaaaaattgttaatatacctctatactttaacgtcaaggagaaaaaaccccggatcggactactagcagctgtaatacgactcactatagggaatattaagcttaaacaatgaggcaggtttggttctcttggattgtgggattgttcctatgttttttcaacgtgtcttctgctgctccagtcaacactacaacagaagatgaaacggcacaaattccggctgaagctgtcatcggttactcagatttagaaggggatttcgatgttgctgttttgccattttccaacagcacaaataacgggttattgtttataaatactactattgccagcattgctgctaaagaagaaggggtatctctcgagaaaagagaggctgaagctatgtggagagaaaacttcttgaagtgcttctcccaatatatcccaaacaacgctactaacgggaagttagtttacactcaaaacaatccattatacatgtctgtcttaaactctactattcataacttaagatttacttccgatcggacccctaagccattggttatcgtcaccccatctcacgtctcccatatccaaggtactatcttatgttctaagaaggttggtttgcaaatccgtactagatctggtggtcacgacgccgaaggtatgtcctatatctctcaagagccatttgtcattgttgacttaagaaatatgagatccattaaaattgatgttcattctcaaactgcttgggtcgaagctggtgccaccttgggtgaagtttactactgggtcaacgaaaaaaacgaaaacttatctttagctgccggttactgtccaaccgtctgtgctggtggtcatttcggtggtggtggttacggtccattgatgcgtaactacggtttagctgctgacaacattattgacgctcatttagttaatgttcacggtaaggttttggacagaaaatctatgggtgaagatttattttgggccttgagaggtggtggtgctgaatccttcggtatcatcgttgcctggaagattcgtttagttgctgtcccttctaagtccaccatgttctccgtcaagaaaatcatggaaattcatgagttggtcaaattggttaacaagtggcaaaacatcgcttacaagtatgacaaggatttgttgttaatgactcacttcatcacccgtaatatcaccgacaaccaaggtaagaacaaaactgctattcacacctacttctcctccgtttttttgggtggtgtcgactccttagtcgatttgatgaacaaatcctttccagaattgggtattaagaaaactgattgtagacaattgtcttggattgacaccattatcttctattctggtgtcgttaactacgacaccgacaactttaacaaggaaattttgttggatcgttctgctggtcaaaatggtgccttcaaaatcaaattggactacgtcaaaaagccaatcccagaatctgttttcgttcaaattttggaaaagttgtacgaagaagacattggtgccggtatgtatgctttgtatccatatggtggtatcatggacgaaatttccgaatctgccatcccattcccacacagagctggtattttatatgaattgtggtacatctgttcttgggaaaagcaagaagacaacgaaaagcatttaaactggattagaaacatttacaacttcatgaccccatacgtttctaagaacccaagattagcctatttgaactaccgtgacttagatattggtattaatgacccaaagaacccaaacaactatactcaagccagaatttggggtgaaaagtacttcggtaagaacttcgatagattagttaaggttaaaactttggtcgatccaaacaacttcttcagaaacgaacaatccatcccaccattgccaagacatcgtcacggccatcatcaccatcaccattagctcgagcatgcatctagagggccgcatcatgtaattagttatgtcacgcttacattcacgccctccccccacatccgctctaaccgaaaaggaaggagttagacaacctgaagtctaggtccctatttatttttttatagttatgttagtattaagaacgttatttatatttcaaatttttcttttttttctgtacagacgcgtgtacgcatgtaacattatactgaaaaccttgcttgagaaggttttgggacgctcgaaggctttaatttgcggccctgcattaatgaatcggccaacgcgcggggagaggcggtttgcgtattgggcgctcttccgcttcctcgctcactgactcgctgcgctcggtcgttcggctgcggcgagcggtatcagctcactcaaaggcggtaatacggttatccacagaatcaggggataacgcaggaaagaacatgtgagcaaaaggccagcaaaagcccaggaaccgtaaaaaggccgcgttgctggcgtttttccataggctccgcccccctgacgagcatcacaaaaatcgacgctcaagtcagaggtggcgaaacccgacaggactataaagataccaggcgtttccccctggaagctccctcgtgcgctctcctgttccgaccctgccgcttaccggatacctgtccgcctttctcccttcgggaagcgtggcgctttctcatagctcacgctgtaggtatctcagttcggtgtaggtcgttcgctccaagctgggctgtgtgcacgaaccccccgttcagcccgaccgctgcgccttatccggtaactatcgtcttgagtccaacccggtaagacacgacttatcgccactggcagcagccactggtaacaggattagcagagcgaggtatgtaggcggtgctacagagttcttgaagtggtggcctaactacggctacactagaagaacagtatttggtatctgcgctctgctgaagccagttaccttcggaaaaagagttggtagctcttgatccggcaaacaaaccaccgctggtagcggtggtttttttgtttgcaagcagcagattacgcgcagaaaaaaaggatctcaagaagatcctttgatcttttctacggggtctgacgctcagtggaacgaaaactcacgttaagggattttggtcatgagattatcaaaaaggatcttcacctagatccttttaaattaaaaatgaagttttaaatcaatctaaagtatatatgagtaaacttggtctgacagttaccaatgcttaatcagtgaggcacctatctcagcgatctgtctatttcgttcatccatagttgcctgactccccgtcgtgtagataactacgatacgggagcgcttaccatctggccccagtgctgcaatgataccgcgagacccacgctcaccggctccagatttatcagcaataaaccagccagccggaagggccgagcgcagaagtggtcctgcaactttatccgcctccattcagtctattaattgttgccgggaagctagagtaagtagttcgccagttaatagtttgcgcaacgttgttggcattgctacaggcatcgtggtgtcactctcgtcgtttggtatggcttcattcagctccggttcccaacgatcaaggcgagttacatgatcccccatgttgtgcaaaaaagcggttagctccttcggtcctccgatcgttgtcagaagtaagttggccgcagtgttatcactcatggttatggcagcactgcataattctcttactgtcatgccatccgtaagatgcttttctgtgactggtgagtactcaaccaagtcattctgagaatagtgtatgcggcgaccgagttgctcttgcccggcgtcaatacgggataatagtgtatcacatagcagaactttaaaagtgctcatcattggaaaacgttcttcggggcgaaaactctcaaggatcttaccgctgttgagatccagttcgatgtaacccactcgtgcacccaactgatcttcagcatcttttactttcaccagcgtttctgggtgagcaaaaacaggaaggcaaaatgccgcaaaaaagggaataagggcgacacggaaatgttgaatactcatactcttcctttttcaatgggtaataactgatataattaaattgaagctctaatttgtgagtttagtatacatgcatttacttataatacagttttttagttttgctggccgcatcttctcaaatatgcttcccagcctgcttttctgtaacgttcaccctctaccttagcatcccttccctttgcaaatagtcctcttccaacaataataatgtcagatcctgtagagaccacatcatccacggttctatactgttgacccaatgcgtctcccttgtcatctaaacccacaccgggtgtcataatcaaccaatcgtaaccttcatctcttccacccatgtctctttgagcaataaagccgataacaaaatctttgtcgctcttcgcaatgtcaacagtacccttagtatattctccagtagatagggagcccttgcatgacaattctgctaacatcaaaaggcctctaggttcctttgttacttcttctgccgcctgcttcaaaccgctaacaatacctgggcccaccacaccgtgtgcattcgtaatgtctgcccattctgctattctgtatacacccgcagagtactgcaatttgactgtattaccaatgtcagcaaattttctgtcttcg

SEQ ID NO: 29 - DNA, 7266 bp, Artificial Sequence
  OXC154-R3G(=GGG)/L21G/T49R/S88A(=GCT)
aagagtaaaaaattgtacttggcggataatgcctttagcggcttaactgtgccctccatggaaaaatcagtcaagatatccacatgtgtttttagtaaacaaattttgggacctaatgcttcaactaactccagtaattccttggtggtacgaacatccaatgaagcacacaagtttgtttgcttttcgtgcatgatattaaatagcttggcagcaacaggactaggatgagtagcagcacgttccttatatgtagctttcgacatgatttatcttcgtttcctgcaggtttttgttctgtgcagttgggttaagaatactgggcaatttcatgtttcttcaacactacatatgcgtatatataccaatctaagtctgtgctccttccttcgttcttccttctgttcggagattaccgaatcaaaaaaatttcaaagaaaccgaaatcaaaaaaaagaataaaaaaaaaatgatgaattgaattgaaaagctagcttatcgatgataagctgtcaaagatgagaattaattccacggactatagactatactagatactccgtctactgtacgatacacttccgctcaggtccttgtcctttaacgaggccttaccactcttttgttactctattgatccagctcagcaaaggcagtgtgatctaagattctatcttcgcgatgtagtaaaactagctagaccgagaaagagactagaaatgcaaaaggcacttctacaatggctgccatcattattatccgatgtgacgctgcagcttctcaatgatattcgaatacgctttgaggagatacagcctaatatccgacaaactgttttacagatttacgatcgtacttgttacccatcattgaattttgaacatccgaacctgggagttttccctgaaacagatagtatatttgaacctgtataataatatatagtctagcgctttacggaagacaatgtatgtatttcggttcctggagaaactattgcatctattgcataggtaatcttgcacgtcgcatccccggttcattttctgcgtttccatcttgcacttcaatagcatatctttgttcgcttgcctgtaacttacacgcgcctcgtatcttttaatgatggaataatttgggaatttactctgtgtttatttatttttatgttttgtatttggattttagaaagtaaataaagaaggtagaagagttacggaatgaagaaaaaaaaataaacaaaggtttaaaaaatttcaacaaaaagcgtactttacatatatatttattagacaagaaaagcagattaaatagatatacattcgattaacgataagtaaaatgtaaaatcacaggattttcgtgtgtggtcttctacacagacaagatgaaacaattcggcattaatacctgagagcaggaagagcaagataaaaggtagtatttgttggcgatccccctagagtcttttacatcttcggaaaacaaaaactattttttctttaatttctttttttactttctatttttaatttatatatttatattaaaaaatttaaattataattatttttatagcacgtgatgaaaaggaccgggaagctccaccccggttgataatcagaaaagccccaaaaacaggaagattgtataagcaaatatttaaattgtaaacgttaatattttgttaaaattcgcgttaaatttttgttaaatcagctcattttttaacgaatagcccgaaatcggcaaaatcccttataaatcaaaagaatagaccgagatagggttgagtgttgttccagtttccaacaagagtccactattaaagaacgtggactccaacgtcaaagggcgaaaaagggtctatcagggcgatggcccactacgtgaaccatcaccctaatcaagttttttggggtcgaggtgccgtaaagcagtaaatcggaagggtaaacggatgcccccatttagagcttgacggggaaagccggcgaacgtggcgagaaaggaagggaagaaagcgaaaggagcgggggctagggcggtgggaagtgtaggggtcacgctgggcgtaaccaccacacccgccgcgcttaatggggcgctacagggcgcgtggggatgatccactagtacggattagaagccgccgagcgggtgacagccctccgaaggaagactctcctccgtgcgtcctcgtcttcaccggtcgcgttcctgaaacgcagatgtgcctcgcgccgcactgctccgaacaataaagattctacaatactagcttttatggttatgaagaggaaaaattggcagtaacctggccccacaaaccttcaaatgaacgaatcaaattaacaaccataggatgataatgcgattagttttttagccttatttctggggtaattaatcagcgaagcgatgatttttgatctattaacagatatataaatgcaaaaactgcataaccactttaactaatactttcaacattttcggtttgtattacttcttattcaaatgtaataaaagtatcaacaaaaaattgttaatatacctctatactttaacgtcaaggagaaaaaaccccggatcggactactagcagctgtaatacgactcactatagggaatattaagcttaaacaatgaggcaggtttggttctcttggattgtgggattgttcctatgttttttcaacgtgtcttctgctgctccagtcaacactacaacagaagatgaaacggcacaaattccggctgaagctgtcatcggttactcagatttagaaggggatttcgatgttgctgttttgccattttccaacagcacaaataacgggttattgtttataaatactactattgccagcattgctgctaaagaagaaggggtatctctcgagaaaagagaggctgaagctatgccaggggaaaacttcttgaagtgcttctcccaatatatcccaaacaacgctactaacgggaagttagtttacactcaaaacaatccattatacatgtctgtcttaaactctactattcataacttaagatttacttccgatcggacccctaagccattggttatcgtcaccccatctcacgtctcccatatccaaggtactatcttatgttctaagaaggttggtttgcaaatccgtactagatctggtggtcacgacgctgaaggtatgtcctatatctctcaagtcccatttgtcattgttgacttaagaaatatgagatccattaaaattgatgttcattctcaaactgcttgggtcgaagctggtgccaccttgggtgaagtttactactgggtcaacgaaaaaaacgaaaacttatctttagctgccggttactgtccaaccgtctgtgctggtggtcatttcggtggtggtggttacggtccattgatgcgtaactacggtttagctgctgacaacattattgacgctcatttagttaatgttcacggtaaggttttggacagaaaatctatgggtgaagatttattttgggccttgagaggtggtggtgctgaatccttcggtatcatcgttgcctggaagattcgtttagttgctgtcccttctaagtccaccatgttctccgtcaagaaaatcatggaaattcatgagttggtcaaattggttaacaagtggcaaaacatcgcttacaagtatgacaaggatttgttgttaatgactcacttcatcacccgtaatatcaccgacaaccaaggtaagaacaaaactgctattcacacctacttctcctccgtttttttgggtggtgtcgactccttagtcgatttgatgaacaaatcctttccagaattgggtattaagaaaactgattgtagacaattgtcttggattgacaccattatcttctattctggtgtcgttaactacgacaccgacaactttaacaaggaaattttgttggatcgttctgctggtcaaaatggtgccttcaaaatcaaattggactacgtcaaaaagccaatcccagaatctgttttcgttcaaattttggaaaagttgtacgaagaagacattggtgccggtatgtatgctttgtatccatatggtggtatcatggacgaaatttccgaatctgccatcccattcccacacagagctggtattttatatgaattgtggtacatctgttcttgggaaaagcaagaagacaacgaaaagcatttaaactggattagaaacatttacaacttcatgaccccatacgtttctaagaacccaagattagcctatttgaactaccgtgacttagatattggtattaatgacccaaagaacccaaacaactatactcaagccagaatttggggtgaaaagtacttcggtaagaacttcgatagattagttaaggttaaaactttggtcgatccaaacaacttcttcagaaacgaacaatccatcccaccattgccaagacatcgtcacggccatcatcaccatcaccattagctcgagcatgcatctagagggccgcatcatgtaattagttatgtcacgcttacattcacgccctccccccacatccgctctaaccgaaaaggaaggagttagacaacctgaagtctaggtccctatttatttttttatagttatgttagtattaagaacgttatttatatttcaaatttttcttttttttctgtacagacgcgtgtacgcatgtaacattatactgaaaaccttgcttgagaaggttttgggacgctcgaaggctttaatttgcggccctgcattaatgaatcggccaacgcgcggggagaggcggtttgcgtattgggcgctcttccgcttcctcgctcactgactcgctgcgctcggtcgttcggctgcggcgagcggtatcagctcactcaaaggcggtaatacggttatccacagaatcaggggataacgcaggaaagaacatgtgagcaaaaggccagcaaaagcccaggaaccgtaaaaaggccgcgttgctggcgtttttccataggctccgcccccctgacgagcatcacaaaaatcgacgctcaagtcagaggtggcgaaacccgacaggactataaagataccaggcgtttccccctggaagctccctcgtgcgctctcctgttccgaccctgccgcttaccggatacctgtccgcctttctcccttcgggaagcgtggcgctttctcatagctcacgctgtaggtatctcagttcggtgtaggtcgttcgctccaagctgggctgtgtgcacgaaccccccgttcagcccgaccgctgcgccttatccggtaactatcgtcttgagtccaacccggtaagacacgacttatcgccactggcagcagccactggtaacaggattagcagagcgaggtatgtaggcggtgctacagagttcttgaagtggtggcctaactacggctacactagaagaacagtatttggtatctgcgctctgctgaagccagttaccttcggaaaaagagttggtagctcttgatccggcaaacaaaccaccgctggtagcggtggtttttttgtttgcaagcagcagattacgcgcagaaaaaaaggatctcaagaagatcctttgatcttttctacggggtctgacgctcagtggaacgaaaactcacgttaagggattttggtcatgagattatcaaaaaggatcttcacctagatccttttaaattaaaaatgaagttttaaatcaatctaaagtatatatgagtaaacttggtctgacagttaccaatgcttaatcagtgaggcacctatctcagcgatctgtctatttcgttcatccatagttgcctgactccccgtcgtgtagataactacgatacgggagcgcttaccatctggccccagtgctgcaatgataccgcgagacccacgctcaccggctccagatttatcagcaataaaccagccagccggaagggccgagcgcagaagtggtcctgcaactttatccgcctccattcagtctattaattgttgccgggaagctagagtaagtagttcgccagttaatagtttgcgcaacgttgttggcattgctacaggcatcgtggtgtcactctcgtcgtttggtatggcttcattcagctccggttcccaacgatcaaggcgagttacatgatcccccatgttgtgcaaaaaagcggttagctccttcggtcctccgatcgttgtcagaagtaagttggccgcagtgttatcactcatggttatggcagcactgcataattctcttactgtcatgccatccgtaagatgcttttctgtgactggtgagtactcaaccaagtcattctgagaatagtgtatgcggcgaccgagttgctcttgcccggcgtcaatacgggataatagtgtatcacatagcagaactttaaaagtgctcatcattggaaaacgttcttcggggcgaaaactctcaaggatcttaccgctgttgagatccagttcgatgtaacccactcgtgcacccaactgatcttcagcatcttttactttcaccagcgtttctgggtgagcaaaaacaggaaggcaaaatgccgcaaaaaagggaataagggcgacacggaaatgttgaatactcatactcttcctttttcaatgggtaataactgatataattaaattgaagctctaatttgtgagtttagtatacatgcatttacttataatacagttttttagttttgctggccgcatcttctcaaatatgcttcccagcctgcttttctgtaacgttcaccctctaccttagcatcccttccctttgcaaatagtcctcttccaacaataataatgtcagatcctgtagagaccacatcatccacggttctatactgttgacccaatgcgtctcccttgtcatctaaacccacaccgggtgtcataatcaaccaatcgtaaccttcatctcttccacccatgtctctttgagcaataaagccgataacaaaatctttgtcgctcttcgcaatgtcaacagtacccttagtatattctccagtagatagggagcccttgcatgacaattctgctaacatcaaaaggcctctaggttcctttgttacttcttctgccgcctgcttcaaaccgctaacaatacctgggcccaccacaccgtgtgcattcgtaatgtctgcccattctgctattctgtatacacccgcagagtactgcaatttgactgtattaccaatgtcagcaaattttctgtcttcg

SEQ ID NO: 30 - DNA, 7266 bp, Artificial Sequence
  OXC154-S295S(=TCA)
aagagtaaaaaattgtacttggcggataatgcctttagcggcttaactgtgccctccatggaaaaatcagtcaagatatccacatgtgtttttagtaaacaaattttgggacctaatgcttcaactaactccagtaattccttggtggtacgaacatccaatgaagcacacaagtttgtttgcttttcgtgcatgatattaaatagcttggcagcaacaggactaggatgagtagcagcacgttccttatatgtagctttcgacatgatttatcttcgtttcctgcaggtttttgttctgtgcagttgggttaagaatactgggcaatttcatgtttcttcaacactacatatgcgtatatataccaatctaagtctgtgctccttccttcgttcttccttctgttcggagattaccgaatcaaaaaaatttcaaagaaaccgaaatcaaaaaaaagaataaaaaaaaaatgatgaattgaattgaaaagctagcttatcgatgataagctgtcaaagatgagaattaattccacggactatagactatactagatactccgtctactgtacgatacacttccgctcaggtccttgtcctttaacgaggccttaccactcttttgttactctattgatccagctcagcaaaggcagtgtgatctaagattctatcttcgcgatgtagtaaaactagctagaccgagaaagagactagaaatgcaaaaggcacttctacaatggctgccatcattattatccgatgtgacgctgcagcttctcaatgatattcgaatacgctttgaggagatacagcctaatatccgacaaactgttttacagatttacgatcgtacttgttacccatcattgaattttgaacatccgaacctgggagttttccctgaaacagatagtatatttgaacctgtataataatatatagtctagcgctttacggaagacaatgtatgtatttcggttcctggagaaactattgcatctattgcataggtaatcttgcacgtcgcatccccggttcattttctgcgtttccatcttgcacttcaatagcatatctttgttcgcttgcctgtaacttacacgcgcctcgtatcttttaatgatggaataatttgggaatttactctgtgtttatttatttttatgttttgtatttggattttagaaagtaaataaagaaggtagaagagttacggaatgaagaaaaaaaaataaacaaaggtttaaaaaatttcaacaaaaagcgtactttacatatatatttattagacaagaaaagcagattaaatagatatacattcgattaacgataagtaaaatgtaaaatcacaggattttcgtgtgtggtcttctacacagacaagatgaaacaattcggcattaatacctgagagcaggaagagcaagataaaaggtagtatttgttggcgatccccctagagtcttttacatcttcggaaaacaaaaactattttttctttaatttctttttttactttctatttttaatttatatatttatattaaaaaatttaaattataattatttttatagcacgtgatgaaaaggaccgggaagctccaccccggttgataatcagaaaagccccaaaaacaggaagattgtataagcaaatatttaaattgtaaacgttaatattttgttaaaattcgcgttaaatttttgttaaatcagctcattttttaacgaatagcccgaaatcggcaaaatcccttataaatcaaaagaatagaccgagatagggttgagtgttgttccagtttccaacaagagtccactattaaagaacgtggactccaacgtcaaagggcgaaaaagggtctatcagggcgatggcccactacgtgaaccatcaccctaatcaagttttttggggtcgaggtgccgtaaagcagtaaatcggaagggtaaacggatgcccccatttagagcttgacggggaaagccggcgaacgtggcgagaaaggaagggaagaaagcgaaaggagcgggggctagggcggtgggaagtgtaggggtcacgctgggcgtaaccaccacacccgccgcgcttaatggggcgctacagggcgcgtggggatgatccactagtacggattagaagccgccgagcgggtgacagccctccgaaggaagactctcctccgtgcgtcctcgtcttcaccggtcgcgttcctgaaacgcagatgtgcctcgcgccgcactgctccgaacaataaagattctacaatactagcttttatggttatgaagaggaaaaattggcagtaacctggccccacaaaccttcaaatgaacgaatcaaattaacaaccataggatgataatgcgattagttttttagccttatttctggggtaattaatcagcgaagcgatgatttttgatctattaacagatatataaatgcaaaaactgcataaccactttaactaatactttcaacattttcggtttgtattacttcttattcaaatgtaataaaagtatcaacaaaaaattgttaatatacctctatactttaacgtcaaggagaaaaaaccccggatcggactactagcagctgtaatacgactcactatagggaatattaagcttaaacaatgaggcaggtttggttctcttggattgtgggattgttcctatgttttttcaacgtgtcttctgctgctccagtcaacactacaacagaagatgaaacggcacaaattccggctgaagctgtcatcggttactcagatttagaaggggatttcgatgttgctgttttgccattttccaacagcacaaataacgggttattgtttataaatactactattgccagcattgctgctaaagaagaaggggtatctctcgagaaaagagaggctgaagctatgccaagagaaaacttcttgaagtgcttctcccaatatatcccaaacaacgctactaacttaaagttagtttacactcaaaacaatccattatacatgtctgtcttaaactctactattcataacttaagatttacttccgatactacccctaagccattggttatcgtcaccccatctcacgtctcccatatccaaggtactatcttatgttctaagaaggttggtttgcaaatccgtactagatctggtggtcacgactctgaaggtatgtcctatatctctcaagtcccatttgtcattgttgacttaagaaatatgagatccattaaaattgatgttcattctcaaactgcttgggtcgaagctggtgccaccttgggtgaagtttactactgggtcaacgaaaaaaacgaaaacttatctttagctgccggttactgtccaaccgtctgtgctggtggtcatttcggtggtggtggttacggtccattgatgcgtaactacggtttagctgctgacaacattattgacgctcatttagttaatgttcacggtaaggttttggacagaaaatctatgggtgaagatttattttgggccttgagaggtggtggtgctgaatccttcggtatcatcgttgcctggaagattcgtttagttgctgtcccttctaagtccaccatgttctccgtcaagaaaatcatggaaattcatgagttggtcaaattggttaacaagtggcaaaacatcgcttacaagtatgacaaggatttgttgttaatgactcacttcatcacccgtaatatcaccgacaaccaaggtaagaacaaaactgctattcacacctacttctcctccgtttttttgggtggtgtcgactcattagtcgatttgatgaacaaatcctttccagaattgggtattaagaaaactgattgtagacaattgtcttggattgacaccattatcttctattctggtgtcgttaactacgacaccgacaactttaacaaggaaattttgttggatcgttctgctggtcaaaatggtgccttcaaaatcaaattggactacgtcaaaaagccaatcccagaatctgttttcgttcaaattttggaaaagttgtacgaagaagacattggtgccggtatgtatgctttgtatccatatggtggtatcatggacgaaatttccgaatctgccatcccattcccacacagagctggtattttatatgaattgtggtacatctgttcttgggaaaagcaagaagacaacgaaaagcatttaaactggattagaaacatttacaacttcatgaccccatacgtttctaagaacccaagattagcctatttgaactaccgtgacttagatattggtattaatgacccaaagaacccaaacaactatactcaagccagaatttggggtgaaaagtacttcggtaagaacttcgatagattagttaaggttaaaactttggtcgatccaaacaacttcttcagaaacgaacaatccatcccaccattgccaagacatcgtcacggccatcatcaccatcaccattagctcgagcatgcatctagagggccgcatcatgtaattagttatgtcacgcttacattcacgccctccccccacatccgctctaaccgaaaaggaaggagttagacaacctgaagtctaggtccctatttatttttttatagttatgttagtattaagaacgttatttatatttcaaatttttcttttttttctgtacagacgcgtgtacgcatgtaacattatactgaaaaccttgcttgagaaggttttgggacgctcgaaggctttaatttgcggccctgcattaatgaatcggccaacgcgcggggagaggcggtttgcgtattgggcgctcttccgcttcctcgctcactgactcgctgcgctcggtcgttcggctgcggcgagcggtatcagctcactcaaaggcggtaatacggttatccacagaatcaggggataacgcaggaaagaacatgtgagcaaaaggccagcaaaagcccaggaaccgtaaaaaggccgcgttgctggcgtttttccataggctccgcccccctgacgagcatcacaaaaatcgacgctcaagtcagaggtggcgaaacccgacaggactataaagataccaggcgtttccccctggaagctccctcgtgcgctctcctgttccgaccctgccgcttaccggatacctgtccgcctttctcccttcgggaagcgtggcgctttctcatagctcacgctgtaggtatctcagttcggtgtaggtcgttcgctccaagctgggctgtgtgcacgaaccccccgttcagcccgaccgctgcgccttatccggtaactatcgtcttgagtccaacccggtaagacacgacttatcgccactggcagcagccactggtaacaggattagcagagcgaggtatgtaggcggtgctacagagttcttgaagtggtggcctaactacggctacactagaagaacagtatttggtatctgcgctctgctgaagccagttaccttcggaaaaagagttggtagctcttgatccggcaaacaaaccaccgctggtagcggtggtttttttgtttgcaagcagcagattacgcgcagaaaaaaaggatctcaagaagatcctttgatcttttctacggggtctgacgctcagtggaacgaaaactcacgttaagggattttggtcatgagattatcaaaaaggatcttcacctagatccttttaaattaaaaatgaagttttaaatcaatctaaagtatatatgagtaaacttggtctgacagttaccaatgcttaatcagtgaggcacctatctcagcgatctgtctatttcgttcatccatagttgcctgactccccgtcgtgtagataactacgatacgggagcgcttaccatctggccccagtgctgcaatgataccgcgagacccacgctcaccggctccagatttatcagcaataaaccagccagccggaagggccgagcgcagaagtggtcctgcaactttatccgcctccattcagtctattaattgttgccgggaagctagagtaagtagttcgccagttaatagtttgcgcaacgttgttggcattgctacaggcatcgtggtgtcactctcgtcgtttggtatggcttcattcagctccggttcccaacgatcaaggcgagttacatgatcccccatgttgtgcaaaaaagcggttagctccttcggtcctccgatcgttgtcagaagtaagttggccgcagtgttatcactcatggttatggcagcactgcataattctcttactgtcatgccatccgtaagatgcttttctgtgactggtgagtactcaaccaagtcattctgagaatagtgtatgcggcgaccgagttgctcttgcccggcgtcaatacgggataatagtgtatcacatagcagaactttaaaagtgctcatcattggaaaacgttcttcggggcgaaaactctcaaggatcttaccgctgttgagatccagttcgatgtaacccactcgtgcacccaactgatcttcagcatcttttactttcaccagcgtttctgggtgagcaaaaacaggaaggcaaaatgccgcaaaaaagggaataagggcgacacggaaatgttgaatactcatactcttcctttttcaatgggtaataactgatataattaaattgaagctctaatttgtgagtttagtatacatgcatttacttataatacagttttttagttttgctggccgcatcttctcaaatatgcttcccagcctgcttttctgtaacgttcaccctctaccttagcatcccttccctttgcaaatagtcctcttccaacaataataatgtcagatcctgtagagaccacatcatccacggttctatactgttgacccaatgcgtctcccttgtcatctaaacccacaccgggtgtcataatcaaccaatcgtaaccttcatctcttccacccatgtctctttgagcaataaagccgataacaaaatctttgtcgctcttcgcaatgtcaacagtacccttagtatattctccagtagatagggagcccttgcatgacaattctgctaacatcaaaaggcctctaggttcctttgttacttcttctgccgcctgcttcaaaccgctaacaatacctgggcccaccacaccgtgtgcattcgtaatgtctgcccattctgctattctgtatacacccgcagagtactgcaatttgactgtattaccaatgtcagcaaattttctgtcttcg

SEQ ID NO: 31 - DNA, 7266 bp, Artificial Sequence
  OXC154-R3V/L21G/S60T/S88A(=GCC)
aagagtaaaaaattgtacttggcggataatgcctttagcggcttaactgtgccctccatggaaaaatcagtcaagatatccacatgtgtttttagtaaacaaattttgggacctaatgcttcaactaactccagtaattccttggtggtacgaacatccaatgaagcacacaagtttgtttgcttttcgtgcatgatattaaatagcttggcagcaacaggactaggatgagtagcagcacgttccttatatgtagctttcgacatgatttatcttcgtttcctgcaggtttttgttctgtgcagttgggttaagaatactgggcaatttcatgtttcttcaacactacatatgcgtatatataccaatctaagtctgtgctccttccttcgttcttccttctgttcggagattaccgaatcaaaaaaatttcaaagaaaccgaaatcaaaaaaaagaataaaaaaaaaatgatgaattgaattgaaaagctagcttatcgatgataagctgtcaaagatgagaattaattccacggactatagactatactagatactccgtctactgtacgatacacttccgctcaggtccttgtcctttaacgaggccttaccactcttttgttactctattgatccagctcagcaaaggcagtgtgatctaagattctatcttcgcgatgtagtaaaactagctagaccgagaaagagactagaaatgcaaaaggcacttctacaatggctgccatcattattatccgatgtgacgctgcagcttctcaatgatattcgaatacgctttgaggagatacagcctaatatccgacaaactgttttacagatttacgatcgtacttgttacccatcattgaattttgaacatccgaacctgggagttttccctgaaacagatagtatatttgaacctgtataataatatatagtctagcgctttacggaagacaatgtatgtatttcggttcctggagaaactattgcatctattgcataggtaatcttgcacgtcgcatccccggttcattttctgcgtttccatcttgcacttcaatagcatatctttgttcgcttgcctgtaacttacacgcgcctcgtatcttttaatgatggaataatttgggaatttactctgtgtttatttatttttatgttttgtatttggattttagaaagtaaataaagaaggtagaagagttacggaatgaagaaaaaaaaataaacaaaggtttaaaaaatttcaacaaaaagcgtactttacatatatatttattagacaagaaaagcagattaaatagatatacattcgattaacgataagtaaaatgtaaaatcacaggattttcgtgtgtggtcttctacacagacaagatgaaacaattcggcattaatacctgagagcaggaagagcaagataaaaggtagtatttgttggcgatccccctagagtcttttacatcttcggaaaacaaaaactattttttctttaatttctttttttactttctatttttaatttatatatttatattaaaaaatttaaattataattatttttatagcacgtgatgaaaaggaccgggaagctccaccccggttgataatcagaaaagccccaaaaacaggaagattgtataagcaaatatttaaattgtaaacgttaatattttgttaaaattcgcgttaaatttttgttaaatcagctcattttttaacgaatagcccgaaatcggcaaaatcccttataaatcaaaagaatagaccgagatagggttgagtgttgttccagtttccaacaagagtccactattaaagaacgtggactccaacgtcaaagggcgaaaaagggtctatcagggcgatggcccactacgtgaaccatcaccctaatcaagttttttggggtcgaggtgccgtaaagcagtaaatcggaagggtaaacggatgcccccatttagagcttgacggggaaagccggcgaacgtggcgagaaaggaagggaagaaagcgaaaggagcgggggctagggcggtgggaagtgtaggggtcacgctgggcgtaaccaccacacccgccgcgcttaatggggcgctacagggcgcgtggggatgatccactagtacggattagaagccgccgagcgggtgacagccctccgaaggaagactctcctccgtgcgtcctcgtcttcaccggtcgcgttcctgaaacgcagatgtgcctcgcgccgcactgctccgaacaataaagattctacaatactagcttttatggttatgaagaggaaaaattggcagtaacctggccccacaaaccttcaaatgaacgaatcaaattaacaaccataggatgataatgcgattagttttttagccttatttctggggtaattaatcagcgaagcgatgatttttgatctattaacagatatataaatgcaaaaactgcataaccactttaactaatactttcaacattttcggtttgtattacttcttattcaaatgtaataaaagtatcaacaaaaaattgttaatatacctctatactttaacgtcaaggagaaaaaaccccggatcggactactagcagctgtaatacgactcactatagggaatattaagcttaaacaatgaggcaggtttggttctcttggattgtgggattgttcctatgttttttcaacgtgtcttctgctgctccagtcaacactacaacagaagatgaaacggcacaaattccggctgaagctgtcatcggttactcagatttagaaggggatttcgatgttgctgttttgccattttccaacagcacaaataacgggttattgtttataaatactactattgccagcattgctgctaaagaagaaggggtatctctcgagaaaagagaggctgaagctatgccagtcgaaaacttcttgaagtgcttctcccaatatatcccaaacaacgctactaacgggaagttagtttacactcaaaacaatccattatacatgtctgtcttaaactctactattcataacttaagatttacttccgatactacccctaagccattggttatcgtcaccccaacgcacgtctcccatatccaaggtactatcttatgttctaagaaggttggtttgcaaatccgtactagatctggtggtcacgacgccgaaggtatgtcctatatctctcaagtcccatttgtcattgttgacttaagaaatatgagatccattaaaattgatgttcattctcaaactgcttgggtcgaagctggtgccaccttgggtgaagtttactactgggtcaacgaaaaaaacgaaaacttatctttagctgccggttactgtccaaccgtctgtgctggtggtcatttcggtggtggtggttacggtccattgatgcgtaactacggtttagctgctgacaacattattgacgctcatttagttaatgttcacggtaaggttttggacagaaaatctatgggtgaagatttattttgggccttgagaggtggtggtgctgaatccttcggtatcatcgttgcctggaagattcgtttagttgctgtcccttctaagtccaccatgttctccgtcaagaaaatcatggaaattcatgagttggtcaaattggttaacaagtggcaaaacatcgcttacaagtatgacaaggatttgttgttaatgactcacttcatcacccgtaatatcaccgacaaccaaggtaagaacaaaactgctattcacacctacttctcctccgtttttttgggtggtgtcgactccttagtcgatttgatgaacaaatcctttccagaattgggtattaagaaaactgattgtagacaattgtcttggattgacaccattatcttctattctggtgtcgttaactacgacaccgacaactttaacaaggaaattttgttggatcgttctgctggtcaaaatggtgccttcaaaatcaaattggactacgtcaaaaagccaatcccagaatctgttttcgttcaaattttggaaaagttgtacgaagaagacattggtgccggtatgtatgctttgtatccatatggtggtatcatggacgaaatttccgaatctgccatcccattcccacacagagctggtattttatatgaattgtggtacatctgttcttgggaaaagcaagaagacaacgaaaagcatttaaactggattagaaacatttacaacttcatgaccccatacgtttctaagaacccaagattagcctatttgaactaccgtgacttagatattggtattaatgacccaaagaacccaaacaactatactcaagccagaatttggggtgaaaagtacttcggtaagaacttcgatagattagttaaggttaaaactttggtcgatccaaacaacttcttcagaaacgaacaatccatcccaccattgccaagacatcgtcacggccatcatcaccatcaccattagctcgagcatgcatctagagggccgcatcatgtaattagttatgtcacgcttacattcacgccctccccccacatccgctctaaccgaaaaggaaggagttagacaacctgaagtctaggtccctatttatttttttatagttatgttagtattaagaacgttatttatatttcaaatttttcttttttttctgtacagacgcgtgtacgcatgtaacattatactgaaaaccttgcttgagaaggttttgggacgctcgaaggctttaatttgcggccctgcattaatgaatcggccaacgcgcggggagaggcggtttgcgtattgggcgctcttccgcttcctcgctcactgactcgctgcgctcggtcgttcggctgcggcgagcggtatcagctcactcaaaggcggtaatacggttatccacagaatcaggggataacgcaggaaagaacatgtgagcaaaaggccagcaaaagcccaggaaccgtaaaaaggccgcgttgctggcgtttttccataggctccgcccccctgacgagcatcacaaaaatcgacgctcaagtcagaggtggcgaaacccgacaggactataaagataccaggcgtttccccctggaagctccctcgtgcgctctcctgttccgaccctgccgcttaccggatacctgtccgcctttctcccttcgggaagcgtggcgctttctcatagctcacgctgtaggtatctcagttcggtgtaggtcgttcgctccaagctgggctgtgtgcacgaaccccccgttcagcccgaccgctgcgccttatccggtaactatcgtcttgagtccaacccggtaagacacgacttatcgccactggcagcagccactggtaacaggattagcagagcgaggtatgtaggcggtgctacagagttcttgaagtggtggcctaactacggctacactagaagaacagtatttggtatctgcgctctgctgaagccagttaccttcggaaaaagagttggtagctcttgatccggcaaacaaaccaccgctggtagcggtggtttttttgtttgcaagcagcagattacgcgcagaaaaaaaggatctcaagaagatcctttgatcttttctacggggtctgacgctcagtggaacgaaaactcacgttaagggattttggtcatgagattatcaaaaaggatcttcacctagatccttttaaattaaaaatgaagttttaaatcaatctaaagtatatatgagtaaacttggtctgacagttaccaatgcttaatcagtgaggcacctatctcagcgatctgtctatttcgttcatccatagttgcctgactccccgtcgtgtagataactacgatacgggagcgcttaccatctggccccagtgctgcaatgataccgcgagacccacgctcaccggctccagatttatcagcaataaaccagccagccggaagggccgagcgcagaagtggtcctgcaactttatccgcctccattcagtctattaattgttgccgggaagctagagtaagtagttcgccagttaatagtttgcgcaacgttgttggcattgctacaggcatcgtggtgtcactctcgtcgtttggtatggcttcattcagctccggttcccaacgatcaaggcgagttacatgatcccccatgttgtgcaaaaaagcggttagctccttcggtcctccgatcgttgtcagaagtaagttggccgcagtgttatcactcatggttatggcagcactgcataattctcttactgtcatgccatccgtaagatgcttttctgtgactggtgagtactcaaccaagtcattctgagaatagtgtatgcggcgaccgagttgctcttgcccggcgtcaatacgggataatagtgtatcacatagcagaactttaaaagtgctcatcattggaaaacgttcttcggggcgaaaactctcaaggatcttaccgctgttgagatccagttcgatgtaacccactcgtgcacccaactgatcttcagcatcttttactttcaccagcgtttctgggtgagcaaaaacaggaaggcaaaatgccgcaaaaaagggaataagggcgacacggaaatgttgaatactcatactcttcctttttcaatgggtaataactgatataattaaattgaagctctaatttgtgagtttagtatacatgcatttacttataatacagttttttagttttgctggccgcatcttctcaaatatgcttcccagcctgcttttctgtaacgttcaccctctaccttagcatcccttccctttgcaaatagtcctcttccaacaataataatgtcagatcctgtagagaccacatcatccacggttctatactgttgacccaatgcgtctcccttgtcatctaaacccacaccgggtgtcataatcaaccaatcgtaaccttcatctcttccacccatgtctctttgagcaataaagccgataacaaaatctttgtcgctcttcgcaatgtcaacagtacccttagtatattctccagtagatagggagcccttgcatgacaattctgctaacatcaaaaggcctctaggttcctttgttacttcttctgccgcctgcttcaaaccgctaacaatacctgggcccaccacaccgtgtgcattcgtaatgtctgcccattctgctattctgtatacacccgcagagtactgcaatttgactgtattaccaatgtcagcaaattttctgtcttcg

SEQ ID NO: 32 - DNA, 7266 bp, Artificial Sequence
  OXC154-R3T/A18E/S88A(=GCC)
aagagtaaaaaattgtacttggcggataatgcctttagcggcttaactgtgccctccatggaaaaatcagtcaagatatccacatgtgtttttagtaaacaaattttgggacctaatgcttcaactaactccagtaattccttggtggtacgaacatccaatgaagcacacaagtttgtttgcttttcgtgcatgatattaaatagcttggcagcaacaggactaggatgagtagcagcacgttccttatatgtagctttcgacatgatttatcttcgtttcctgcaggtttttgttctgtgcagttgggttaagaatactgggcaatttcatgtttcttcaacactacatatgcgtatatataccaatctaagtctgtgctccttccttcgttcttccttctgttcggagattaccgaatcaaaaaaatttcaaagaaaccgaaatcaaaaaaaagaataaaaaaaaaatgatgaattgaattgaaaagctagcttatcgatgataagctgtcaaagatgagaattaattccacggactatagactatactagatactccgtctactgtacgatacacttccgctcaggtccttgtcctttaacgaggccttaccactcttttgttactctattgatccagctcagcaaaggcagtgtgatctaagattctatcttcgcgatgtagtaaaactagctagaccgagaaagagactagaaatgcaaaaggcacttctacaatggctgccatcattattatccgatgtgacgctgcagcttctcaatgatattcgaatacgctttgaggagatacagcctaatatccgacaaactgttttacagatttacgatcgtacttgttacccatcattgaattttgaacatccgaacctgggagttttccctgaaacagatagtatatttgaacctgtataataatatatagtctagcgctttacggaagacaatgtatgtatttcggttcctggagaaactattgcatctattgcataggtaatcttgcacgtcgcatccccggttcattttctgcgtttccatcttgcacttcaatagcatatctttgttcgcttgcctgtaacttacacgcgcctcgtatcttttaatgatggaataatttgggaatttactctgtgtttatttatttttatgttttgtatttggattttagaaagtaaataaagaaggtagaagagttacggaatgaagaaaaaaaaataaacaaaggtttaaaaaatttcaacaaaaagcgtactttacatatatatttattagacaagaaaagcagattaaatagatatacattcgattaacgataagtaaaatgtaaaatcacaggattttcgtgtgtggtcttctacacagacaagatgaaacaattcggcattaatacctgagagcaggaagagcaagataaaaggtagtatttgttggcgatccccctagagtcttttacatcttcggaaaacaaaaactattttttctttaatttctttttttactttctatttttaatttatatatttatattaaaaaatttaaattataattatttttatagcacgtgatgaaaaggaccgggaagctccaccccggttgataatcagaaaagccccaaaaacaggaagattgtataagcaaatatttaaattgtaaacgttaatattttgttaaaattcgcgttaaatttttgttaaatcagctcattttttaacgaatagcccgaaatcggcaaaatcccttataaatcaaaagaatagaccgagatagggttgagtgttgttccagtttccaacaagagtccactattaaagaacgtggactccaacgtcaaagggcgaaaaagggtctatcagggcgatggcccactacgtgaaccatcaccctaatcaagttttttggggtcgaggtgccgtaaagcagtaaatcggaagggtaaacggatgcccccatttagagcttgacggggaaagccggcgaacgtggcgagaaaggaagggaagaaagcgaaaggagcgggggctagggcggtgggaagtgtaggggtcacgctgggcgtaaccaccacacccgccgcgcttaatggggcgctacagggcgcgtggggatgatccactagtacggattagaagccgccgagcgggtgacagccctccgaaggaagactctcctccgtgcgtcctcgtcttcaccggtcgcgttcctgaaacgcagatgtgcctcgcgccgcactgctccgaacaataaagattctacaatactagcttttatggttatgaagaggaaaaattggcagtaacctggccccacaaaccttcaaatgaacgaatcaaattaacaaccataggatgataatgcgattagttttttagccttatttctggggtaattaatcagcgaagcgatgatttttgatctattaacagatatataaatgcaaaaactgcataaccactttaactaatactttcaacattttcggtttgtattacttcttattcaaatgtaataaaagtatcaacaaaaaattgttaatatacctctatactttaacgtcaaggagaaaaaaccccggatcggactactagcagctgtaatacgactcactatagggaatattaagcttaaacaatgaggcaggtttggttctcttggattgtgggattgttcctatgttttttcaacgtgtcttctgctgctccagtcaacactacaacagaagatgaaacggcacaaattccggctgaagctgtcatcggttactcagatttagaaggggatttcgatgttgctgttttgccattttccaacagcacaaataacgggttattgtttataaatactactattgccagcattgctgctaaagaagaaggggtatctctcgagaaaagagaggctgaagctatgccaacggaaaacttcttgaagtgcttctcccaatatatcccaaacaacgagactaacttaaagttagtttacactcaaaacaatccattatacatgtctgtcttaaactctactattcataacttaagatttacttccgatactacccctaagccattggttatcgtcaccccatctcacgtctcccatatccaaggtactatcttatgttctaagaaggttggtttgcaaatccgtactagatctggtggtcacgacgccgaaggtatgtcctatatctctcaagtcccatttgtcattgttgacttaagaaatatgagatccattaaaattgatgttcattctcaaactgcttgggtcgaagctggtgccaccttgggtgaagtttactactgggtcaacgaaaaaaacgaaaacttatctttagctgccggttactgtccaaccgtctgtgctggtggtcatttcggtggtggtggttacggtccattgatgcgtaactacggtttagctgctgacaacattattgacgctcatttagttaatgttcacggtaaggttttggacagaaaatctatgggtgaagatttattttgggccttgagaggtggtggtgctgaatccttcggtatcatcgttgcctggaagattcgtttagttgctgtcccttctaagtccaccatgttctccgtcaagaaaatcatggaaattcatgagttggtcaaattggttaacaagtggcaaaacatcgcttacaagtatgacaaggatttgttgttaatgactcacttcatcacccgtaatatcaccgacaaccaaggtaagaacaaaactgctattcacacctacttctcctccgtttttttgggtggtgtcgactccttagtcgatttgatgaacaaatcctttccagaattgggtattaagaaaactgattgtagacaattgtcttggattgacaccattatcttctattctggtgtcgttaactacgacaccgacaactttaacaaggaaattttgttggatcgttctgctggtcaaaatggtgccttcaaaatcaaattggactacgtcaaaaagccaatcccagaatctgttttcgttcaaattttggaaaagttgtacgaagaagacattggtgccggtatgtatgctttgtatccatatggtggtatcatggacgaaatttccgaatctgccatcccattcccacacagagctggtattttatatgaattgtggtacatctgttcttgggaaaagcaagaagacaacgaaaagcatttaaactggattagaaacatttacaacttcatgaccccatacgtttctaagaacccaagattagcctatttgaactaccgtgacttagatattggtattaatgacccaaagaacccaaacaactatactcaagccagaatttggggtgaaaagtacttcggtaagaacttcgatagattagttaaggttaaaactttggtcgatccaaacaacttcttcagaaacgaacaatccatcccaccattgccaagacatcgtcacggccatcatcaccatcaccattagctcgagcatgcatctagagggccgcatcatgtaattagttatgtcacgcttacattcacgccctccccccacatccgctctaaccgaaaaggaaggagttagacaacctgaagtctaggtccctatttatttttttatagttatgttagtattaagaacgttatttatatttcaaatttttcttttttttctgtacagacgcgtgtacgcatgtaacattatactgaaaaccttgcttgagaaggttttgggacgctcgaaggctttaatttgcggccctgcattaatgaatcggccaacgcgcggggagaggcggtttgcgtattgggcgctcttccgcttcctcgctcactgactcgctgcgctcggtcgttcggctgcggcgagcggtatcagctcactcaaaggcggtaatacggttatccacagaatcaggggataacgcaggaaagaacatgtgagcaaaaggccagcaaaagcccaggaaccgtaaaaaggccgcgttgctggcgtttttccataggctccgcccccctgacgagcatcacaaaaatcgacgctcaagtcagaggtggcgaaacccgacaggactataaagataccaggcgtttccccctggaagctccctcgtgcgctctcctgttccgaccctgccgcttaccggatacctgtccgcctttctcccttcgggaagcgtggcgctttctcatagctcacgctgtaggtatctcagttcggtgtaggtcgttcgctccaagctgggctgtgtgcacgaaccccccgttcagcccgaccgctgcgccttatccggtaactatcgtcttgagtccaacccggtaagacacgacttatcgccactggcagcagccactggtaacaggattagcagagcgaggtatgtaggcggtgctacagagttcttgaagtggtggcctaactacggctacactagaagaacagtatttggtatctgcgctctgctgaagccagttaccttcggaaaaagagttggtagctcttgatccggcaaacaaaccaccgctggtagcggtggtttttttgtttgcaagcagcagattacgcgcagaaaaaaaggatctcaagaagatcctttgatcttttctacggggtctgacgctcagtggaacgaaaactcacgttaagggattttggtcatgagattatcaaaaaggatcttcacctagatccttttaaattaaaaatgaagttttaaatcaatctaaagtatatatgagtaaacttggtctgacagttaccaatgcttaatcagtgaggcacctatctcagcgatctgtctatttcgttcatccatagttgcctgactccccgtcgtgtagataactacgatacgggagcgcttaccatctggccccagtgctgcaatgataccgcgagacccacgctcaccggctccagatttatcagcaataaaccagccagccggaagggccgagcgcagaagtggtcctgcaactttatccgcctccattcagtctattaattgttgccgggaagctagagtaagtagttcgccagttaatagtttgcgcaacgttgttggcattgctacaggcatcgtggtgtcactctcgtcgtttggtatggcttcattcagctccggttcccaacgatcaaggcgagttacatgatcccccatgttgtgcaaaaaagcggttagctccttcggtcctccgatcgttgtcagaagtaagttggccgcagtgttatcactcatggttatggcagcactgcataattctcttactgtcatgccatccgtaagatgcttttctgtgactggtgagtactcaaccaagtcattctgagaatagtgtatgcggcgaccgagttgctcttgcccggcgtcaatacgggataatagtgtatcacatagcagaactttaaaagtgctcatcattggaaaacgttcttcggggcgaaaactctcaaggatcttaccgctgttgagatccagttcgatgtaacccactcgtgcacccaactgatcttcagcatcttttactttcaccagcgtttctgggtgagcaaaaacaggaaggcaaaatgccgcaaaaaagggaataagggcgacacggaaatgttgaatactcatactcttcctttttcaatgggtaataactgatataattaaattgaagctctaatttgtgagtttagtatacatgcatttacttataatacagttttttagttttgctggccgcatcttctcaaatatgcttcccagcctgcttttctgtaacgttcaccctctaccttagcatcccttccctttgcaaatagtcctcttccaacaataataatgtcagatcctgtagagaccacatcatccacggttctatactgttgacccaatgcgtctcccttgtcatctaaacccacaccgggtgtcataatcaaccaatcgtaaccttcatctcttccacccatgtctctttgagcaataaagccgataacaaaatctttgtcgctcttcgcaatgtcaacagtacccttagtatattctccagtagatagggagcccttgcatgacaattctgctaacatcaaaaggcctctaggttcctttgttacttcttctgccgcctgcttcaaaccgctaacaatacctgggcccaccacaccgtgtgcattcgtaatgtctgcccattctgctattctgtatacacccgcagagtactgcaatttgactgtattaccaatgtcagcaaattttctgtcttcg

SEQ ID NO: 33 - DNA, 7266 bp, Artificial Sequence
  OXC154-S60T/S88A(=GCT)
aagagtaaaaaattgtacttggcggataatgcctttagcggcttaactgtgccctccatggaaaaatcagtcaagatatccacatgtgtttttagtaaacaaattttgggacctaatgcttcaactaactccagtaattccttggtggtacgaacatccaatgaagcacacaagtttgtttgcttttcgtgcatgatattaaatagcttggcagcaacaggactaggatgagtagcagcacgttccttatatgtagctttcgacatgatttatcttcgtttcctgcaggtttttgttctgtgcagttgggttaagaatactgggcaatttcatgtttcttcaacactacatatgcgtatatataccaatctaagtctgtgctccttccttcgttcttccttctgttcggagattaccgaatcaaaaaaatttcaaagaaaccgaaatcaaaaaaaagaataaaaaaaaaatgatgaattgaattgaaaagctagcttatcgatgataagctgtcaaagatgagaattaattccacggactatagactatactagatactccgtctactgtacgatacacttccgctcaggtccttgtcctttaacgaggccttaccactcttttgttactctattgatccagctcagcaaaggcagtgtgatctaagattctatcttcgcgatgtagtaaaactagctagaccgagaaagagactagaaatgcaaaaggcacttctacaatggctgccatcattattatccgatgtgacgctgcagcttctcaatgatattcgaatacgctttgaggagatacagcctaatatccgacaaactgttttacagatttacgatcgtacttgttacccatcattgaattttgaacatccgaacctgggagttttccctgaaacagatagtatatttgaacctgtataataatatatagtctagcgctttacggaagacaatgtatgtatttcggttcctggagaaactattgcatctattgcataggtaatcttgcacgtcgcatccccggttcattttctgcgtttccatcttgcacttcaatagcatatctttgttcgcttgcctgtaacttacacgcgcctcgtatcttttaatgatggaataatttgggaatttactctgtgtttatttatttttatgttttgtatttggattttagaaagtaaataaagaaggtagaagagttacggaatgaagaaaaaaaaataaacaaaggtttaaaaaatttcaacaaaaagcgtactttacatatatatttattagacaagaaaagcagattaaatagatatacattcgattaacgataagtaaaatgtaaaatcacaggattttcgtgtgtggtcttctacacagacaagatgaaacaattcggcattaatacctgagagcaggaagagcaagataaaaggtagtatttgttggcgatccccctagagtcttttacatcttcggaaaacaaaaactattttttctttaatttctttttttactttctatttttaatttatatatttatattaaaaaatttaaattataattatttttatagcacgtgatgaaaaggaccgggaagctccaccccggttgataatcagaaaagccccaaaaacaggaagattgtataagcaaatatttaaattgtaaacgttaatattttgttaaaattcgcgttaaatttttgttaaatcagctcattttttaacgaatagcccgaaatcggcaaaatcccttataaatcaaaagaatagaccgagatagggttgagtgttgttccagtttccaacaagagtccactattaaagaacgtggactccaacgtcaaagggcgaaaaagggtctatcagggcgatggcccactacgtgaaccatcaccctaatcaagttttttggggtcgaggtgccgtaaagcagtaaatcggaagggtaaacggatgcccccatttagagcttgacggggaaagccggcgaacgtggcgagaaaggaagggaagaaagcgaaaggagcgggggctagggcggtgggaagtgtaggggtcacgctgggcgtaaccaccacacccgccgcgcttaatggggcgctacagggcgcgtggggatgatccactagtacggattagaagccgccgagcgggtgacagccctccgaaggaagactctcctccgtgcgtcctcgtcttcaccggtcgcgttcctgaaacgcagatgtgcctcgcgccgcactgctccgaacaataaagattctacaatactagcttttatggttatgaagaggaaaaattggcagtaacctggccccacaaaccttcaaatgaacgaatcaaattaacaaccataggatgataatgcgattagttttttagccttatttctggggtaattaatcagcgaagcgatgatttttgatctattaacagatatataaatgcaaaaactgcataaccactttaactaatactttcaacattttcggtttgtattacttcttattcaaatgtaataaaagtatcaacaaaaaattgttaatatacctctatactttaacgtcaaggagaaaaaaccccggatcggactactagcagctgtaatacgactcactatagggaatattaagcttaaacaatgaggcaggtttggttctcttggattgtgggattgttcctatgttttttcaacgtgtcttctgctgctccagtcaacactacaacagaagatgaaacggcacaaattccggctgaagctgtcatcggttactcagatttagaaggggatttcgatgttgctgttttgccattttccaacagcacaaataacgggttattgtttataaatactactattgccagcattgctgctaaagaagaaggggtatctctcgagaaaagagaggctgaagctatgccaagagaaaacttcttgaagtgcttctcccaatatatcccaaacaacgctactaacttaaagttagtttacactcaaaacaatccattatacatgtctgtcttaaactctactattcataacttaagatttacttccgatactacccctaagccattggttatcgtcaccccaacgcacgtctcccatatccaaggtactatcttatgttctaagaaggttggtttgcaaatccgtactagatctggtggtcacgacgctgaaggtatgtcctatatctctcaagtcccatttgtcattgttgacttaagaaatatgagatccattaaaattgatgttcattctcaaactgcttgggtcgaagctggtgccaccttgggtgaagtttactactgggtcaacgaaaaaaacgaaaacttatctttagctgccggttactgtccaaccgtctgtgctggtggtcatttcggtggtggtggttacggtccattgatgcgtaactacggtttagctgctgacaacattattgacgctcatttagttaatgttcacggtaaggttttggacagaaaatctatgggtgaagatttattttgggccttgagaggtggtggtgctgaatccttcggtatcatcgttgcctggaagattcgtttagttgctgtcccttctaagtccaccatgttctccgtcaagaaaatcatggaaattcatgagttggtcaaattggttaacaagtggcaaaacatcgcttacaagtatgacaaggatttgttgttaatgactcacttcatcacccgtaatatcaccgacaaccaaggtaagaacaaaactgctattcacacctacttctcctccgtttttttgggtggtgtcgactccttagtcgatttgatgaacaaatcctttccagaattgggtattaagaaaactgattgtagacaattgtcttggattgacaccattatcttctattctggtgtcgttaactacgacaccgacaactttaacaaggaaattttgttggatcgttctgctggtcaaaatggtgccttcaaaatcaaattggactacgtcaaaaagccaatcccagaatctgttttcgttcaaattttggaaaagttgtacgaagaagacattggtgccggtatgtatgctttgtatccatatggtggtatcatggacgaaatttccgaatctgccatcccattcccacacagagctggtattttatatgaattgtggtacatctgttcttgggaaaagcaagaagacaacgaaaagcatttaaactggattagaaacatttacaacttcatgaccccatacgtttctaagaacccaagattagcctatttgaactaccgtgacttagatattggtattaatgacccaaagaacccaaacaactatactcaagccagaatttggggtgaaaagtacttcggtaagaacttcgatagattagttaaggttaaaactttggtcgatccaaacaacttcttcagaaacgaacaatccatcccaccattgccaagacatcgtcacggccatcatcaccatcaccattagctcgagcatgcatctagagggccgcatcatgtaattagttatgtcacgcttacattcacgccctccccccacatccgctctaaccgaaaaggaaggagttagacaacctgaagtctaggtccctatttatttttttatagttatgttagtattaagaacgttatttatatttcaaatttttcttttttttctgtacagacgcgtgtacgcatgtaacattatactgaaaaccttgcttgagaaggttttgggacgctcgaaggctttaatttgcggccctgcattaatgaatcggccaacgcgcggggagaggcggtttgcgtattgggcgctcttccgcttcctcgctcactgactcgctgcgctcggtcgttcggctgcggcgagcggtatcagctcactcaaaggcggtaatacggttatccacagaatcaggggataacgcaggaaagaacatgtgagcaaaaggccagcaaaagcccaggaaccgtaaaaaggccgcgttgctggcgtttttccataggctccgcccccctgacgagcatcacaaaaatcgacgctcaagtcagaggtggcgaaacccgacaggactataaagataccaggcgtttccccctggaagctccctcgtgcgctctcctgttccgaccctgccgcttaccggatacctgtccgcctttctcccttcgggaagcgtggcgctttctcatagctcacgctgtaggtatctcagttcggtgtaggtcgttcgctccaagctgggctgtgtgcacgaaccccccgttcagcccgaccgctgcgccttatccggtaactatcgtcttgagtccaacccggtaagacacgacttatcgccactggcagcagccactggtaacaggattagcagagcgaggtatgtaggcggtgctacagagttcttgaagtggtggcctaactacggctacactagaagaacagtatttggtatctgcgctctgctgaagccagttaccttcggaaaaagagttggtagctcttgatccggcaaacaaaccaccgctggtagcggtggtttttttgtttgcaagcagcagattacgcgcagaaaaaaaggatctcaagaagatcctttgatcttttctacggggtctgacgctcagtggaacgaaaactcacgttaagggattttggtcatgagattatcaaaaaggatcttcacctagatccttttaaattaaaaatgaagttttaaatcaatctaaagtatatatgagtaaacttggtctgacagttaccaatgcttaatcagtgaggcacctatctcagcgatctgtctatttcgttcatccatagttgcctgactccccgtcgtgtagataactacgatacgggagcgcttaccatctggccccagtgctgcaatgataccgcgagacccacgctcaccggctccagatttatcagcaataaaccagccagccggaagggccgagcgcagaagtggtcctgcaactttatccgcctccattcagtctattaattgttgccgggaagctagagtaagtagttcgccagttaatagtttgcgcaacgttgttggcattgctacaggcatcgtggtgtcactctcgtcgtttggtatggcttcattcagctccggttcccaacgatcaaggcgagttacatgatcccccatgttgtgcaaaaaagcggttagctccttcggtcctccgatcgttgtcagaagtaagttggccgcagtgttatcactcatggttatggcagcactgcataattctcttactgtcatgccatccgtaagatgcttttctgtgactggtgagtactcaaccaagtcattctgagaatagtgtatgcggcgaccgagttgctcttgcccggcgtcaatacgggataatagtgtatcacatagcagaactttaaaagtgctcatcattggaaaacgttcttcggggcgaaaactctcaaggatcttaccgctgttgagatccagttcgatgtaacccactcgtgcacccaactgatcttcagcatcttttactttcaccagcgtttctgggtgagcaaaaacaggaaggcaaaatgccgcaaaaaagggaataagggcgacacggaaatgttgaatactcatactcttcctttttcaatgggtaataactgatataattaaattgaagctctaatttgtgagtttagtatacatgcatttacttataatacagttttttagttttgctggccgcatcttctcaaatatgcttcccagcctgcttttctgtaacgttcaccctctaccttagcatcccttccctttgcaaatagtcctcttccaacaataataatgtcagatcctgtagagaccacatcatccacggttctatactgttgacccaatgcgtctcccttgtcatctaaacccacaccgggtgtcataatcaaccaatcgtaaccttcatctcttccacccatgtctctttgagcaataaagccgataacaaaatctttgtcgctcttcgcaatgtcaacagtacccttagtatattctccagtagatagggagcccttgcatgacaattctgctaacatcaaaaggcctctaggttcctttgttacttcttctgccgcctgcttcaaaccgctaacaatacctgggcccaccacaccgtgtgcattcgtaatgtctgcccattctgctattctgtatacacccgcagagtactgcaatttgactgtattaccaatgtcagcaaattttctgtcttcg

SEQ ID NO: 34 - DNA, 7266 bp, Artificial Sequence
  OXC154-R3W/T49R/S88A(=GCT)
aagagtaaaaaattgtacttggcggataatgcctttagcggcttaactgtgccctccatggaaaaatcagtcaagatatccacatgtgtttttagtaaacaaattttgggacctaatgcttcaactaactccagtaattccttggtggtacgaacatccaatgaagcacacaagtttgtttgcttttcgtgcatgatattaaatagcttggcagcaacaggactaggatgagtagcagcacgttccttatatgtagctttcgacatgatttatcttcgtttcctgcaggtttttgttctgtgcagttgggttaagaatactgggcaatttcatgtttcttcaacactacatatgcgtatatataccaatctaagtctgtgctccttccttcgttcttccttctgttcggagattaccgaatcaaaaaaatttcaaagaaaccgaaatcaaaaaaaagaataaaaaaaaaatgatgaattgaattgaaaagctagcttatcgatgataagctgtcaaagatgagaattaattccacggactatagactatactagatactccgtctactgtacgatacacttccgctcaggtccttgtcctttaacgaggccttaccactcttttgttactctattgatccagctcagcaaaggcagtgtgatctaagattctatcttcgcgatgtagtaaaactagctagaccgagaaagagactagaaatgcaaaaggcacttctacaatggctgccatcattattatccgatgtgacgctgcagcttctcaatgatattcgaatacgctttgaggagatacagcctaatatccgacaaactgttttacagatttacgatcgtacttgttacccatcattgaattttgaacatccgaacctgggagttttccctgaaacagatagtatatttgaacctgtataataatatatagtctagcgctttacggaagacaatgtatgtatttcggttcctggagaaactattgcatctattgcataggtaatcttgcacgtcgcatccccggttcattttctgcgtttccatcttgcacttcaatagcatatctttgttcgcttgcctgtaacttacacgcgcctcgtatcttttaatgatggaataatttgggaatttactctgtgtttatttatttttatgttttgtatttggattttagaaagtaaataaagaaggtagaagagttacggaatgaagaaaaaaaaataaacaaaggtttaaaaaatttcaacaaaaagcgtactttacatatatatttattagacaagaaaagcagattaaatagatatacattcgattaacgataagtaaaatgtaaaatcacaggattttcgtgtgtggtcttctacacagacaagatgaaacaattcggcattaatacctgagagcaggaagagcaagataaaaggtagtatttgttggcgatccccctagagtcttttacatcttcggaaaacaaaaactattttttctttaatttctttttttactttctatttttaatttatatatttatattaaaaaatttaaattataattatttttatagcacgtgatgaaaaggaccgggaagctccaccccggttgataatcagaaaagccccaaaaacaggaagattgtataagcaaatatttaaattgtaaacgttaatattttgttaaaattcgcgttaaatttttgttaaatcagctcattttttaacgaatagcccgaaatcggcaaaatcccttataaatcaaaagaatagaccgagatagggttgagtgttgttccagtttccaacaagagtccactattaaagaacgtggactccaacgtcaaagggcgaaaaagggtctatcagggcgatggcccactacgtgaaccatcaccctaatcaagttttttggggtcgaggtgccgtaaagcagtaaatcggaagggtaaacggatgcccccatttagagcttgacggggaaagccggcgaacgtggcgagaaaggaagggaagaaagcgaaaggagcgggggctagggcggtgggaagtgtaggggtcacgctgggcgtaaccaccacacccgccgcgcttaatggggcgctacagggcgcgtggggatgatccactagtacggattagaagccgccgagcgggtgacagccctccgaaggaagactctcctccgtgcgtcctcgtcttcaccggtcgcgttcctgaaacgcagatgtgcctcgcgccgcactgctccgaacaataaagattctacaatactagcttttatggttatgaagaggaaaaattggcagtaacctggccccacaaaccttcaaatgaacgaatcaaattaacaaccataggatgataatgcgattagttttttagccttatttctggggtaattaatcagcgaagcgatgatttttgatctattaacagatatataaatgcaaaaactgcataaccactttaactaatactttcaacattttcggtttgtattacttcttattcaaatgtaataaaagtatcaacaaaaaattgttaatatacctctatactttaacgtcaaggagaaaaaaccccggatcggactactagcagctgtaatacgactcactatagggaatattaagcttaaacaatgaggcaggtttggttctcttggattgtgggattgttcctatgttttttcaacgtgtcttctgctgctccagtcaacactacaacagaagatgaaacggcacaaattccggctgaagctgtcatcggttactcagatttagaaggggatttcgatgttgctgttttgccattttccaacagcacaaataacgggttattgtttataaatactactattgccagcattgctgctaaagaagaaggggtatctctcgagaaaagagaggctgaagctatgccatgggaaaacttcttgaagtgcttctcccaatatatcccaaacaacgctactaacttaaagttagtttacactcaaaacaatccattatacatgtctgtcttaaactctactattcataacttaagatttacttccgatcggacccctaagccattggttatcgtcaccccatctcacgtctcccatatccaaggtactatcttatgttctaagaaggttggtttgcaaatccgtactagatctggtggtcacgacgctgaaggtatgtcctatatctctcaagtcccatttgtcattgttgacttaagaaatatgagatccattaaaattgatgttcattctcaaactgcttgggtcgaagctggtgccaccttgggtgaagtttactactgggtcaacgaaaaaaacgaaaacttatctttagctgccggttactgtccaaccgtctgtgctggtggtcatttcggtggtggtggttacggtccattgatgcgtaactacggtttagctgctgacaacattattgacgctcatttagttaatgttcacggtaaggttttggacagaaaatctatgggtgaagatttattttgggccttgagaggtggtggtgctgaatccttcggtatcatcgttgcctggaagattcgtttagttgctgtcccttctaagtccaccatgttctccgtcaagaaaatcatggaaattcatgagttggtcaaattggttaacaagtggcaaaacatcgcttacaagtatgacaaggatttgttgttaatgactcacttcatcacccgtaatatcaccgacaaccaaggtaagaacaaaactgctattcacacctacttctcctccgtttttttgggtggtgtcgactccttagtcgatttgatgaacaaatcctttccagaattgggtattaagaaaactgattgtagacaattgtcttggattgacaccattatcttctattctggtgtcgttaactacgacaccgacaactttaacaaggaaattttgttggatcgttctgctggtcaaaatggtgccttcaaaatcaaattggactacgtcaaaaagccaatcccagaatctgttttcgttcaaattttggaaaagttgtacgaagaagacattggtgccggtatgtatgctttgtatccatatggtggtatcatggacgaaatttccgaatctgccatcccattcccacacagagctggtattttatatgaattgtggtacatctgttcttgggaaaagcaagaagacaacgaaaagcatttaaactggattagaaacatttacaacttcatgaccccatacgtttctaagaacccaagattagcctatttgaactaccgtgacttagatattggtattaatgacccaaagaacccaaacaactatactcaagccagaatttggggtgaaaagtacttcggtaagaacttcgatagattagttaaggttaaaactttggtcgatccaaacaacttcttcagaaacgaacaatccatcccaccattgccaagacatcgtcacggccatcatcaccatcaccattagctcgagcatgcatctagagggccgcatcatgtaattagttatgtcacgcttacattcacgccctccccccacatccgctctaaccgaaaaggaaggagttagacaacctgaagtctaggtccctatttatttttttatagttatgttagtattaagaacgttatttatatttcaaatttttcttttttttctgtacagacgcgtgtacgcatgtaacattatactgaaaaccttgcttgagaaggttttgggacgctcgaaggctttaatttgcggccctgcattaatgaatcggccaacgcgcggggagaggcggtttgcgtattgggcgctcttccgcttcctcgctcactgactcgctgcgctcggtcgttcggctgcggcgagcggtatcagctcactcaaaggcggtaatacggttatccacagaatcaggggataacgcaggaaagaacatgtgagcaaaaggccagcaaaagcccaggaaccgtaaaaaggccgcgttgctggcgtttttccataggctccgcccccctgacgagcatcacaaaaatcgacgctcaagtcagaggtggcgaaacccgacaggactataaagataccaggcgtttccccctggaagctccctcgtgcgctctcctgttccgaccctgccgcttaccggatacctgtccgcctttctcccttcgggaagcgtggcgctttctcatagctcacgctgtaggtatctcagttcggtgtaggtcgttcgctccaagctgggctgtgtgcacgaaccccccgttcagcccgaccgctgcgccttatccggtaactatcgtcttgagtccaacccggtaagacacgacttatcgccactggcagcagccactggtaacaggattagcagagcgaggtatgtaggcggtgctacagagttcttgaagtggtggcctaactacggctacactagaagaacagtatttggtatctgcgctctgctgaagccagttaccttcggaaaaagagttggtagctcttgatccggcaaacaaaccaccgctggtagcggtggtttttttgtttgcaagcagcagattacgcgcagaaaaaaaggatctcaagaagatcctttgatcttttctacggggtctgacgctcagtggaacgaaaactcacgttaagggattttggtcatgagattatcaaaaaggatcttcacctagatccttttaaattaaaaatgaagttttaaatcaatctaaagtatatatgagtaaacttggtctgacagttaccaatgcttaatcagtgaggcacctatctcagcgatctgtctatttcgttcatccatagttgcctgactccccgtcgtgtagataactacgatacgggagcgcttaccatctggccccagtgctgcaatgataccgcgagacccacgctcaccggctccagatttatcagcaataaaccagccagccggaagggccgagcgcagaagtggtcctgcaactttatccgcctccattcagtctattaattgttgccgggaagctagagtaagtagttcgccagttaatagtttgcgcaacgttgttggcattgctacaggcatcgtggtgtcactctcgtcgtttggtatggcttcattcagctccggttcccaacgatcaaggcgagttacatgatcccccatgttgtgcaaaaaagcggttagctccttcggtcctccgatcgttgtcagaagtaagttggccgcagtgttatcactcatggttatggcagcactgcataattctcttactgtcatgccatccgtaagatgcttttctgtgactggtgagtactcaaccaagtcattctgagaatagtgtatgcggcgaccgagttgctcttgcccggcgtcaatacgggataatagtgtatcacatagcagaactttaaaagtgctcatcattggaaaacgttcttcggggcgaaaactctcaaggatcttaccgctgttgagatccagttcgatgtaacccactcgtgcacccaactgatcttcagcatcttttactttcaccagcgtttctgggtgagcaaaaacaggaaggcaaaatgccgcaaaaaagggaataagggcgacacggaaatgttgaatactcatactcttcctttttcaatgggtaataactgatataattaaattgaagctctaatttgtgagtttagtatacatgcatttacttataatacagttttttagttttgctggccgcatcttctcaaatatgcttcccagcctgcttttctgtaacgttcaccctctaccttagcatcccttccctttgcaaatagtcctcttccaacaataataatgtcagatcctgtagagaccacatcatccacggttctatactgttgacccaatgcgtctcccttgtcatctaaacccacaccgggtgtcataatcaaccaatcgtaaccttcatctcttccacccatgtctctttgagcaataaagccgataacaaaatctttgtcgctcttcgcaatgtcaacagtacccttagtatattctccagtagatagggagcccttgcatgacaattctgctaacatcaaaaggcctctaggttcctttgttacttcttctgccgcctgcttcaaaccgctaacaatacctgggcccaccacaccgtgtgcattcgtaatgtctgcccattctgctattctgtatacacccgcagagtactgcaatttgactgtattaccaatgtcagcaaattttctgtcttcg

SEQ ID NO: 35 - DNA, 7266 bp, Artificial Sequence
  OXC154-T49R/S88A(=GCC)
aagagtaaaaaattgtacttggcggataatgcctttagcggcttaactgtgccctccatggaaaaatcagtcaagatatccacatgtgtttttagtaaacaaattttgggacctaatgcttcaactaactccagtaattccttggtggtacgaacatccaatgaagcacacaagtttgtttgcttttcgtgcatgatattaaatagcttggcagcaacaggactaggatgagtagcagcacgttccttatatgtagctttcgacatgatttatcttcgtttcctgcaggtttttgttctgtgcagttgggttaagaatactgggcaatttcatgtttcttcaacactacatatgcgtatatataccaatctaagtctgtgctccttccttcgttcttccttctgttcggagattaccgaatcaaaaaaatttcaaagaaaccgaaatcaaaaaaaagaataaaaaaaaaatgatgaattgaattgaaaagctagcttatcgatgataagctgtcaaagatgagaattaattccacggactatagactatactagatactccgtctactgtacgatacacttccgctcaggtccttgtcctttaacgaggccttaccactcttttgttactctattgatccagctcagcaaaggcagtgtgatctaagattctatcttcgcgatgtagtaaaactagctagaccgagaaagagactagaaatgcaaaaggcacttctacaatggctgccatcattattatccgatgtgacgctgcagcttctcaatgatattcgaatacgctttgaggagatacagcctaatatccgacaaactgttttacagatttacgatcgtacttgttacccatcattgaattttgaacatccgaacctgggagttttccctgaaacagatagtatatttgaacctgtataataatatatagtctagcgctttacggaagacaatgtatgtatttcggttcctggagaaactattgcatctattgcataggtaatcttgcacgtcgcatccccggttcattttctgcgtttccatcttgcacttcaatagcatatctttgttcgcttgcctgtaacttacacgcgcctcgtatcttttaatgatggaataatttgggaatttactctgtgtttatttatttttatgttttgtatttggattttagaaagtaaataaagaaggtagaagagttacggaatgaagaaaaaaaaataaacaaaggtttaaaaaatttcaacaaaaagcgtactttacatatatatttattagacaagaaaagcagattaaatagatatacattcgattaacgataagtaaaatgtaaaatcacaggattttcgtgtgtggtcttctacacagacaagatgaaacaattcggcattaatacctgagagcaggaagagcaagataaaaggtagtatttgttggcgatccccctagagtcttttacatcttcggaaaacaaaaactattttttctttaatttctttttttactttctatttttaatttatatatttatattaaaaaatttaaattataattatttttatagcacgtgatgaaaaggaccgggaagctccaccccggttgataatcagaaaagccccaaaaacaggaagattgtataagcaaatatttaaattgtaaacgttaatattttgttaaaattcgcgttaaatttttgttaaatcagctcattttttaacgaatagcccgaaatcggcaaaatcccttataaatcaaaagaatagaccgagatagggttgagtgttgttccagtttccaacaagagtccactattaaagaacgtggactccaacgtcaaagggcgaaaaagggtctatcagggcgatggcccactacgtgaaccatcaccctaatcaagttttttggggtcgaggtgccgtaaagcagtaaatcggaagggtaaacggatgcccccatttagagcttgacggggaaagccggcgaacgtggcgagaaaggaagggaagaaagcgaaaggagcgggggctagggcggtgggaagtgtaggggtcacgctgggcgtaaccaccacacccgccgcgcttaatggggcgctacagggcgcgtggggatgatccactagtacggattagaagccgccgagcgggtgacagccctccgaaggaagactctcctccgtgcgtcctcgtcttcaccggtcgcgttcctgaaacgcagatgtgcctcgcgccgcactgctccgaacaataaagattctacaatactagcttttatggttatgaagaggaaaaattggcagtaacctggccccacaaaccttcaaatgaacgaatcaaattaacaaccataggatgataatgcgattagttttttagccttatttctggggtaattaatcagcgaagcgatgatttttgatctattaacagatatataaatgcaaaaactgcataaccactttaactaatactttcaacattttcggtttgtattacttcttattcaaatgtaataaaagtatcaacaaaaaattgttaatatacctctatactttaacgtcaaggagaaaaaaccccggatcggactactagcagctgtaatacgactcactatagggaatattaagcttaaacaatgaggcaggtttggttctcttggattgtgggattgttcctatgttttttcaacgtgtcttctgctgctccagtcaacactacaacagaagatgaaacggcacaaattccggctgaagctgtcatcggttactcagatttagaaggggatttcgatgttgctgttttgccattttccaacagcacaaataacgggttattgtttataaatactactattgccagcattgctgctaaagaagaaggggtatctctcgagaaaagagaggctgaagctatgccaagagaaaacttcttgaagtgcttctcccaatatatcccaaacaacgctactaacttaaagttagtttacactcaaaacaatccattatacatgtctgtcttaaactctactattcataacttaagatttacttccgatcggacccctaagccattggttatcgtcaccccatctcacgtctcccatatccaaggtactatcttatgttctaagaaggttggtttgcaaatccgtactagatctggtggtcacgacgccgaaggtatgtcctatatctctcaagtcccatttgtcattgttgacttaagaaatatgagatccattaaaattgatgttcattctcaaactgcttgggtcgaagctggtgccaccttgggtgaagtttactactgggtcaacgaaaaaaacgaaaacttatctttagctgccggttactgtccaaccgtctgtgctggtggtcatttcggtggtggtggttacggtccattgatgcgtaactacggtttagctgctgacaacattattgacgctcatttagttaatgttcacggtaaggttttggacagaaaatctatgggtgaagatttattttgggccttgagaggtggtggtgctgaatccttcggtatcatcgttgcctggaagattcgtttagttgctgtcccttctaagtccaccatgttctccgtcaagaaaatcatggaaattcatgagttggtcaaattggttaacaagtggcaaaacatcgcttacaagtatgacaaggatttgttgttaatgactcacttcatcacccgtaatatcaccgacaaccaaggtaagaacaaaactgctattcacacctacttctcctccgtttttttgggtggtgtcgactccttagtcgatttgatgaacaaatcctttccagaattgggtattaagaaaactgattgtagacaattgtcttggattgacaccattatcttctattctggtgtcgttaactacgacaccgacaactttaacaaggaaattttgttggatcgttctgctggtcaaaatggtgccttcaaaatcaaattggactacgtcaaaaagccaatcccagaatctgttttcgttcaaattttggaaaagttgtacgaagaagacattggtgccggtatgtatgctttgtatccatatggtggtatcatggacgaaatttccgaatctgccatcccattcccacacagagctggtattttatatgaattgtggtacatctgttcttgggaaaagcaagaagacaacgaaaagcatttaaactggattagaaacatttacaacttcatgaccccatacgtttctaagaacccaagattagcctatttgaactaccgtgacttagatattggtattaatgacccaaagaacccaaacaactatactcaagccagaatttggggtgaaaagtacttcggtaagaacttcgatagattagttaaggttaaaactttggtcgatccaaacaacttcttcagaaacgaacaatccatcccaccattgccaagacatcgtcacggccatcatcaccatcaccattagctcgagcatgcatctagagggccgcatcatgtaattagttatgtcacgcttacattcacgccctccccccacatccgctctaaccgaaaaggaaggagttagacaacctgaagtctaggtccctatttatttttttatagttatgttagtattaagaacgttatttatatttcaaatttttcttttttttctgtacagacgcgtgtacgcatgtaacattatactgaaaaccttgcttgagaaggttttgggacgctcgaaggctttaatttgcggccctgcattaatgaatcggccaacgcgcggggagaggcggtttgcgtattgggcgctcttccgcttcctcgctcactgactcgctgcgctcggtcgttcggctgcggcgagcggtatcagctcactcaaaggcggtaatacggttatccacagaatcaggggataacgcaggaaagaacatgtgagcaaaaggccagcaaaagcccaggaaccgtaaaaaggccgcgttgctggcgtttttccataggctccgcccccctgacgagcatcacaaaaatcgacgctcaagtcagaggtggcgaaacccgacaggactataaagataccaggcgtttccccctggaagctccctcgtgcgctctcctgttccgaccctgccgcttaccggatacctgtccgcctttctcccttcgggaagcgtggcgctttctcatagctcacgctgtaggtatctcagttcggtgtaggtcgttcgctccaagctgggctgtgtgcacgaaccccccgttcagcccgaccgctgcgccttatccggtaactatcgtcttgagtccaacccggtaagacacgacttatcgccactggcagcagccactggtaacaggattagcagagcgaggtatgtaggcggtgctacagagttcttgaagtggtggcctaactacggctacactagaagaacagtatttggtatctgcgctctgctgaagccagttaccttcggaaaaagagttggtagctcttgatccggcaaacaaaccaccgctggtagcggtggtttttttgtttgcaagcagcagattacgcgcagaaaaaaaggatctcaagaagatcctttgatcttttctacggggtctgacgctcagtggaacgaaaactcacgttaagggattttggtcatgagattatcaaaaaggatcttcacctagatccttttaaattaaaaatgaagttttaaatcaatctaaagtatatatgagtaaacttggtctgacagttaccaatgcttaatcagtgaggcacctatctcagcgatctgtctatttcgttcatccatagttgcctgactccccgtcgtgtagataactacgatacgggagcgcttaccatctggccccagtgctgcaatgataccgcgagacccacgctcaccggctccagatttatcagcaataaaccagccagccggaagggccgagcgcagaagtggtcctgcaactttatccgcctccattcagtctattaattgttgccgggaagctagagtaagtagttcgccagttaatagtttgcgcaacgttgttggcattgctacaggcatcgtggtgtcactctcgtcgtttggtatggcttcattcagctccggttcccaacgatcaaggcgagttacatgatcccccatgttgtgcaaaaaagcggttagctccttcggtcctccgatcgttgtcagaagtaagttggccgcagtgttatcactcatggttatggcagcactgcataattctcttactgtcatgccatccgtaagatgcttttctgtgactggtgagtactcaaccaagtcattctgagaatagtgtatgcggcgaccgagttgctcttgcccggcgtcaatacgggataatagtgtatcacatagcagaactttaaaagtgctcatcattggaaaacgttcttcggggcgaaaactctcaaggatcttaccgctgttgagatccagttcgatgtaacccactcgtgcacccaactgatcttcagcatcttttactttcaccagcgtttctgggtgagcaaaaacaggaaggcaaaatgccgcaaaaaagggaataagggcgacacggaaatgttgaatactcatactcttcctttttcaatgggtaataactgatataattaaattgaagctctaatttgtgagtttagtatacatgcatttacttataatacagttttttagttttgctggccgcatcttctcaaatatgcttcccagcctgcttttctgtaacgttcaccctctaccttagcatcccttccctttgcaaatagtcctcttccaacaataataatgtcagatcctgtagagaccacatcatccacggttctatactgttgacccaatgcgtctcccttgtcatctaaacccacaccgggtgtcataatcaaccaatcgtaaccttcatctcttccacccatgtctctttgagcaataaagccgataacaaaatctttgtcgctcttcgcaatgtcaacagtacccttagtatattctccagtagatagggagcccttgcatgacaattctgctaacatcaaaaggcctctaggttcctttgttacttcttctgccgcctgcttcaaaccgctaacaatacctgggcccaccacaccgtgtgcattcgtaatgtctgcccattctgctattctgtatacacccgcagagtactgcaatttgactgtattaccaatgtcagcaaattttctgtcttcg

SEQ ID NO: 36 - DNA, 7266 bp, Artificial Sequence
  OXC154-R3W/S47F
aagagtaaaaaattgtacttggcggataatgcctttagcggcttaactgtgccctccatggaaaaatcagtcaagatatccacatgtgtttttagtaaacaaattttgggacctaatgcttcaactaactccagtaattccttggtggtacgaacatccaatgaagcacacaagtttgtttgcttttcgtgcatgatattaaatagcttggcagcaacaggactaggatgagtagcagcacgttccttatatgtagctttcgacatgatttatcttcgtttcctgcaggtttttgttctgtgcagttgggttaagaatactgggcaatttcatgtttcttcaacactacatatgcgtatatataccaatctaagtctgtgctccttccttcgttcttccttctgttcggagattaccgaatcaaaaaaatttcaaagaaaccgaaatcaaaaaaaagaataaaaaaaaaatgatgaattgaattgaaaagctagcttatcgatgataagctgtcaaagatgagaattaattccacggactatagactatactagatactccgtctactgtacgatacacttccgctcaggtccttgtcctttaacgaggccttaccactcttttgttactctattgatccagctcagcaaaggcagtgtgatctaagattctatcttcgcgatgtagtaaaactagctagaccgagaaagagactagaaatgcaaaaggcacttctacaatggctgccatcattattatccgatgtgacgctgcagcttctcaatgatattcgaatacgctttgaggagatacagcctaatatccgacaaactgttttacagatttacgatcgtacttgttacccatcattgaattttgaacatccgaacctgggagttttccctgaaacagatagtatatttgaacctgtataataatatatagtctagcgctttacggaagacaatgtatgtatttcggttcctggagaaactattgcatctattgcataggtaatcttgcacgtcgcatccccggttcattttctgcgtttccatcttgcacttcaatagcatatctttgttcgcttgcctgtaacttacacgcgcctcgtatcttttaatgatggaataatttgggaatttactctgtgtttatttatttttatgttttgtatttggattttagaaagtaaataaagaaggtagaagagttacggaatgaagaaaaaaaaataaacaaaggtttaaaaaatttcaacaaaaagcgtactttacatatatatttattagacaagaaaagcagattaaatagatatacattcgattaacgataagtaaaatgtaaaatcacaggattttcgtgtgtggtcttctacacagacaagatgaaacaattcggcattaatacctgagagcaggaagagcaagataaaaggtagtatttgttggcgatccccctagagtcttttacatcttcggaaaacaaaaactattttttctttaatttctttttttactttctatttttaatttatatatttatattaaaaaatttaaattataattatttttatagcacgtgatgaaaaggaccgggaagctccaccccggttgataatcagaaaagccccaaaaacaggaagattgtataagcaaatatttaaattgtaaacgttaatattttgttaaaattcgcgttaaatttttgttaaatcagctcattttttaacgaatagcccgaaatcggcaaaatcccttataaatcaaaagaatagaccgagatagggttgagtgttgttccagtttccaacaagagtccactattaaagaacgtggactccaacgtcaaagggcgaaaaagggtctatcagggcgatggcccactacgtgaaccatcaccctaatcaagttttttggggtcgaggtgccgtaaagcagtaaatcggaagggtaaacggatgcccccatttagagcttgacggggaaagccggcgaacgtggcgagaaaggaagggaagaaagcgaaaggagcgggggctagggcggtgggaagtgtaggggtcacgctgggcgtaaccaccacacccgccgcgcttaatggggcgctacagggcgcgtggggatgatccactagtacggattagaagccgccgagcgggtgacagccctccgaaggaagactctcctccgtgcgtcctcgtcttcaccggtcgcgttcctgaaacgcagatgtgcctcgcgccgcactgctccgaacaataaagattctacaatactagcttttatggttatgaagaggaaaaattggcagtaacctggccccacaaaccttcaaatgaacgaatcaaattaacaaccataggatgataatgcgattagttttttagccttatttctggggtaattaatcagcgaagcgatgatttttgatctattaacagatatataaatgcaaaaactgcataaccactttaactaatactttcaacattttcggtttgtattacttcttattcaaatgtaataaaagtatcaacaaaaaattgttaatatacctctatactttaacgtcaaggagaaaaaaccccggatcggactactagcagctgtaatacgactcactatagggaatattaagcttaaacaatgaggcaggtttggttctcttggattgtgggattgttcctatgttttttcaacgtgtcttctgctgctccagtcaacactacaacagaagatgaaacggcacaaattccggctgaagctgtcatcggttactcagatttagaaggggatttcgatgttgctgttttgccattttccaacagcacaaataacgggttattgtttataaatactactattgccagcattgctgctaaagaagaaggggtatctctcgagaaaagagaggctgaagctatgccatgggaaaacttcttgaagtgcttctcccaatatatcccaaacaacgctactaacttaaagttagtttacactcaaaacaatccattatacatgtctgtcttaaactctactattcataacttaagatttactttcgatactacccctaagccattggttatcgtcaccccatctcacgtctcccatatccaaggtactatcttatgttctaagaaggttggtttgcaaatccgtactagatctggtggtcacgactctgaaggtatgtcctatatctctcaagtcccatttgtcattgttgacttaagaaatatgagatccattaaaattgatgttcattctcaaactgcttgggtcgaagctggtgccaccttgggtgaagtttactactgggtcaacgaaaaaaacgaaaacttatctttagctgccggttactgtccaaccgtctgtgctggtggtcatttcggtggtggtggttacggtccattgatgcgtaactacggtttagctgctgacaacattattgacgctcatttagttaatgttcacggtaaggttttggacagaaaatctatgggtgaagatttattttgggccttgagaggtggtggtgctgaatccttcggtatcatcgttgcctggaagattcgtttagttgctgtcccttctaagtccaccatgttctccgtcaagaaaatcatggaaattcatgagttggtcaaattggttaacaagtggcaaaacatcgcttacaagtatgacaaggatttgttgttaatgactcacttcatcacccgtaatatcaccgacaaccaaggtaagaacaaaactgctattcacacctacttctcctccgtttttttgggtggtgtcgactccttagtcgatttgatgaacaaatcctttccagaattgggtattaagaaaactgattgtagacaattgtcttggattgacaccattatcttctattctggtgtcgttaactacgacaccgacaactttaacaaggaaattttgttggatcgttctgctggtcaaaatggtgccttcaaaatcaaattggactacgtcaaaaagccaatcccagaatctgttttcgttcaaattttggaaaagttgtacgaagaagacattggtgccggtatgtatgctttgtatccatatggtggtatcatggacgaaatttccgaatctgccatcccattcccacacagagctggtattttatatgaattgtggtacatctgttcttgggaaaagcaagaagacaacgaaaagcatttaaactggattagaaacatttacaacttcatgaccccatacgtttctaagaacccaagattagcctatttgaactaccgtgacttagatattggtattaatgacccaaagaacccaaacaactatactcaagccagaatttggggtgaaaagtacttcggtaagaacttcgatagattagttaaggttaaaactttggtcgatccaaacaacttcttcagaaacgaacaatccatcccaccattgccaagacatcgtcacggccatcatcaccatcaccattagctcgagcatgcatctagagggccgcatcatgtaattagttatgtcacgcttacattcacgccctccccccacatccgctctaaccgaaaaggaaggagttagacaacctgaagtctaggtccctatttatttttttatagttatgttagtattaagaacgttatttatatttcaaatttttcttttttttctgtacagacgcgtgtacgcatgtaacattatactgaaaaccttgcttgagaaggttttgggacgctcgaaggctttaatttgcggccctgcattaatgaatcggccaacgcgcggggagaggcggtttgcgtattgggcgctcttccgcttcctcgctcactgactcgctgcgctcggtcgttcggctgcggcgagcggtatcagctcactcaaaggcggtaatacggttatccacagaatcaggggataacgcaggaaagaacatgtgagcaaaaggccagcaaaagcccaggaaccgtaaaaaggccgcgttgctggcgtttttccataggctccgcccccctgacgagcatcacaaaaatcgacgctcaagtcagaggtggcgaaacccgacaggactataaagataccaggcgtttccccctggaagctccctcgtgcgctctcctgttccgaccctgccgcttaccggatacctgtccgcctttctcccttcgggaagcgtggcgctttctcatagctcacgctgtaggtatctcagttcggtgtaggtcgttcgctccaagctgggctgtgtgcacgaaccccccgttcagcccgaccgctgcgccttatccggtaactatcgtcttgagtccaacccggtaagacacgacttatcgccactggcagcagccactggtaacaggattagcagagcgaggtatgtaggcggtgctacagagttcttgaagtggtggcctaactacggctacactagaagaacagtatttggtatctgcgctctgctgaagccagttaccttcggaaaaagagttggtagctcttgatccggcaaacaaaccaccgctggtagcggtggtttttttgtttgcaagcagcagattacgcgcagaaaaaaaggatctcaagaagatcctttgatcttttctacggggtctgacgctcagtggaacgaaaactcacgttaagggattttggtcatgagattatcaaaaaggatcttcacctagatccttttaaattaaaaatgaagttttaaatcaatctaaagtatatatgagtaaacttggtctgacagttaccaatgcttaatcagtgaggcacctatctcagcgatctgtctatttcgttcatccatagttgcctgactccccgtcgtgtagataactacgatacgggagcgcttaccatctggccccagtgctgcaatgataccgcgagacccacgctcaccggctccagatttatcagcaataaaccagccagccggaagggccgagcgcagaagtggtcctgcaactttatccgcctccattcagtctattaattgttgccgggaagctagagtaagtagttcgccagttaatagtttgcgcaacgttgttggcattgctacaggcatcgtggtgtcactctcgtcgtttggtatggcttcattcagctccggttcccaacgatcaaggcgagttacatgatcccccatgttgtgcaaaaaagcggttagctccttcggtcctccgatcgttgtcagaagtaagttggccgcagtgttatcactcatggttatggcagcactgcataattctcttactgtcatgccatccgtaagatgcttttctgtgactggtgagtactcaaccaagtcattctgagaatagtgtatgcggcgaccgagttgctcttgcccggcgtcaatacgggataatagtgtatcacatagcagaactttaaaagtgctcatcattggaaaacgttcttcggggcgaaaactctcaaggatcttaccgctgttgagatccagttcgatgtaacccactcgtgcacccaactgatcttcagcatcttttactttcaccagcgtttctgggtgagcaaaaacaggaaggcaaaatgccgcaaaaaagggaataagggcgacacggaaatgttgaatactcatactcttcctttttcaatgggtaataactgatataattaaattgaagctctaatttgtgagtttagtatacatgcatttacttataatacagttttttagttttgctggccgcatcttctcaaatatgcttcccagcctgcttttctgtaacgttcaccctctaccttagcatcccttccctttgcaaatagtcctcttccaacaataataatgtcagatcctgtagagaccacatcatccacggttctatactgttgacccaatgcgtctcccttgtcatctaaacccacaccgggtgtcataatcaaccaatcgtaaccttcatctcttccacccatgtctctttgagcaataaagccgataacaaaatctttgtcgctcttcgcaatgtcaacagtacccttagtatattctccagtagatagggagcccttgcatgacaattctgctaacatcaaaaggcctctaggttcctttgttacttcttctgccgcctgcttcaaaccgctaacaatacctgggcccaccacaccgtgtgcattcgtaatgtctgcccattctgctattctgtatacacccgcagagtactgcaatttgactgtattaccaatgtcagcaaattttctgtcttcg

SEQ ID NO: 37 - DNA, 7266 bp, Artificial Sequence
  OXC154-A347G/I372L/L451G
aagagtaaaaaattgtacttggcggataatgcctttagcggcttaactgtgccctccatggaaaaatcagtcaagatatccacatgtgtttttagtaaacaaattttgggacctaatgcttcaactaactccagtaattccttggtggtacgaacatccaatgaagcacacaagtttgtttgcttttcgtgcatgatattaaatagcttggcagcaacaggactaggatgagtagcagcacgttccttatatgtagctttcgacatgatttatcttcgtttcctgcaggtttttgttctgtgcagttgggttaagaatactgggcaatttcatgtttcttcaacactacatatgcgtatatataccaatctaagtctgtgctccttccttcgttcttccttctgttcggagattaccgaatcaaaaaaatttcaaagaaaccgaaatcaaaaaaaagaataaaaaaaaaatgatgaattgaattgaaaagctagcttatcgatgataagctgtcaaagatgagaattaattccacggactatagactatactagatactccgtctactgtacgatacacttccgctcaggtccttgtcctttaacgaggccttaccactcttttgttactctattgatccagctcagcaaaggcagtgtgatctaagattctatcttcgcgatgtagtaaaactagctagaccgagaaagagactagaaatgcaaaaggcacttctacaatggctgccatcattattatccgatgtgacgctgcagcttctcaatgatattcgaatacgctttgaggagatacagcctaatatccgacaaactgttttacagatttacgatcgtacttgttacccatcattgaattttgaacatccgaacctgggagttttccctgaaacagatagtatatttgaacctgtataataatatatagtctagcgctttacggaagacaatgtatgtatttcggttcctggagaaactattgcatctattgcataggtaatcttgcacgtcgcatccccggttcattttctgcgtttccatcttgcacttcaatagcatatctttgttcgcttgcctgtaacttacacgcgcctcgtatcttttaatgatggaataatttgggaatttactctgtgtttatttatttttatgttttgtatttggattttagaaagtaaataaagaaggtagaagagttacggaatgaagaaaaaaaaataaacaaaggtttaaaaaatttcaacaaaaagcgtactttacatatatatttattagacaagaaaagcagattaaatagatatacattcgattaacgataagtaaaatgtaaaatcacaggattttcgtgtgtggtcttctacacagacaagatgaaacaattcggcattaatacctgagagcaggaagagcaagataaaaggtagtatttgttggcgatccccctagagtcttttacatcttcggaaaacaaaaactattttttctttaatttctttttttactttctatttttaatttatatatttatattaaaaaatttaaattataattatttttatagcacgtgatgaaaaggaccgggaagctccaccccggttgataatcagaaaagccccaaaaacaggaagattgtataagcaaatatttaaattgtaaacgttaatattttgttaaaattcgcgttaaatttttgttaaatcagctcattttttaacgaatagcccgaaatcggcaaaatcccttataaatcaaaagaatagaccgagatagggttgagtgttgttccagtttccaacaagagtccactattaaagaacgtggactccaacgtcaaagggcgaaaaagggtctatcagggcgatggcccactacgtgaaccatcaccctaatcaagttttttggggtcgaggtgccgtaaagcagtaaatcggaagggtaaacggatgcccccatttagagcttgacggggaaagccggcgaacgtggcgagaaaggaagggaagaaagcgaaaggagcgggggctagggcggtgggaagtgtaggggtcacgctgggcgtaaccaccacacccgccgcgcttaatggggcgctacagggcgcgtggggatgatccactagtacggattagaagccgccgagcgggtgacagccctccgaaggaagactctcctccgtgcgtcctcgtcttcaccggtcgcgttcctgaaacgcagatgtgcctcgcgccgcactgctccgaacaataaagattctacaatactagcttttatggttatgaagaggaaaaattggcagtaacctggccccacaaaccttcaaatgaacgaatcaaattaacaaccataggatgataatgcgattagttttttagccttatttctggggtaattaatcagcgaagcgatgatttttgatctattaacagatatataaatgcaaaaactgcataaccactttaactaatactttcaacattttcggtttgtattacttcttattcaaatgtaataaaagtatcaacaaaaaattgttaatatacctctatactttaacgtcaaggagaaaaaaccccggatcggactactagcagctgtaatacgactcactatagggaatattaagcttaaacaatgaggcaggtttggttctcttggattgtgggattgttcctatgttttttcaacgtgtcttctgctgctccagtcaacactacaacagaagatgaaacggcacaaattccggctgaagctgtcatcggttactcagatttagaaggggatttcgatgttgctgttttgccattttccaacagcacaaataacgggttattgtttataaatactactattgccagcattgctgctaaagaagaaggggtatctctcgagaaaagagaggctgaagctatgccaagagaaaacttcttgaagtgcttctcccaatatatcccaaacaacgctactaacttaaagttagtttacactcaaaacaatccattatacatgtctgtcttaaactctactattcataacttaagatttacttccgatactacccctaagccattggttatcgtcaccccatctcacgtctcccatatccaaggtactatcttatgttctaagaaggttggtttgcaaatccgtactagatctggtggtcacgactctgaaggtatgtcctatatctctcaagtcccatttgtcattgttgacttaagaaatatgagatccattaaaattgatgttcattctcaaactgcttgggtcgaagctggtgccaccttgggtgaagtttactactgggtcaacgaaaaaaacgaaaacttatctttagctgccggttactgtccaaccgtctgtgctggtggtcatttcggtggtggtggttacggtccattgatgcgtaactacggtttagctgctgacaacattattgacgctcatttagttaatgttcacggtaaggttttggacagaaaatctatgggtgaagatttattttgggccttgagaggtggtggtgctgaatccttcggtatcatcgttgcctggaagattcgtttagttgctgtcccttctaagtccaccatgttctccgtcaagaaaatcatggaaattcatgagttggtcaaattggttaacaagtggcaaaacatcgcttacaagtatgacaaggatttgttgttaatgactcacttcatcacccgtaatatcaccgacaaccaaggtaagaacaaaactgctattcacacctacttctcctccgtttttttgggtggtgtcgactccttagtcgatttgatgaacaaatcctttccagaattgggtattaagaaaactgattgtagacaattgtcttggattgacaccattatcttctattctggtgtcgttaactacgacaccgacaactttaacaaggaaattttgttggatcgttctgggggtcaaaatggtgccttcaaaatcaaattggactacgtcaaaaagccaatcccagaatctgttttcgttcaactgttggaaaagttgtacgaagaagacattggtgccggtatgtatgctttgtatccatatggtggtatcatggacgaaatttccgaatctgccatcccattcccacacagagctggtattttatatgaattgtggtacatctgttcttgggaaaagcaagaagacaacgaaaagcatttaaactggattagaaacatttacaacttcatgaccccatacgtttctaagaacccaagaggcgcctatttgaactaccgtgacttagatattggtattaatgacccaaagaacccaaacaactatactcaagccagaatttggggtgaaaagtacttcggtaagaacttcgatagattagttaaggttaaaactttggtcgatccaaacaacttcttcagaaacgaacaatccatcccaccattgccaagacatcgtcacggccatcatcaccatcaccattagctcgagcatgcatctagagggccgcatcatgtaattagttatgtcacgcttacattcacgccctccccccacatccgctctaaccgaaaaggaaggagttagacaacctgaagtctaggtccctatttatttttttatagttatgttagtattaagaacgttatttatatttcaaatttttcttttttttctgtacagacgcgtgtacgcatgtaacattatactgaaaaccttgcttgagaaggttttgggacgctcgaaggctttaatttgcggccctgcattaatgaatcggccaacgcgcggggagaggcggtttgcgtattgggcgctcttccgcttcctcgctcactgactcgctgcgctcggtcgttcggctgcggcgagcggtatcagctcactcaaaggcggtaatacggttatccacagaatcaggggataacgcaggaaagaacatgtgagcaaaaggccagcaaaagcccaggaaccgtaaaaaggccgcgttgctggcgtttttccataggctccgcccccctgacgagcatcacaaaaatcgacgctcaagtcagaggtggcgaaacccgacaggactataaagataccaggcgtttccccctggaagctccctcgtgcgctctcctgttccgaccctgccgcttaccggatacctgtccgcctttctcccttcgggaagcgtggcgctttctcatagctcacgctgtaggtatctcagttcggtgtaggtcgttcgctccaagctgggctgtgtgcacgaaccccccgttcagcccgaccgctgcgccttatccggtaactatcgtcttgagtccaacccggtaagacacgacttatcgccactggcagcagccactggtaacaggattagcagagcgaggtatgtaggcggtgctacagagttcttgaagtggtggcctaactacggctacactagaagaacagtatttggtatctgcgctctgctgaagccagttaccttcggaaaaagagttggtagctcttgatccggcaaacaaaccaccgctggtagcggtggtttttttgtttgcaagcagcagattacgcgcagaaaaaaaggatctcaagaagatcctttgatcttttctacggggtctgacgctcagtggaacgaaaactcacgttaagggattttggtcatgagattatcaaaaaggatcttcacctagatccttttaaattaaaaatgaagttttaaatcaatctaaagtatatatgagtaaacttggtctgacagttaccaatgcttaatcagtgaggcacctatctcagcgatctgtctatttcgttcatccatagttgcctgactccccgtcgtgtagataactacgatacgggagcgcttaccatctggccccagtgctgcaatgataccgcgagacccacgctcaccggctccagatttatcagcaataaaccagccagccggaagggccgagcgcagaagtggtcctgcaactttatccgcctccattcagtctattaattgttgccgggaagctagagtaagtagttcgccagttaatagtttgcgcaacgttgttggcattgctacaggcatcgtggtgtcactctcgtcgtttggtatggcttcattcagctccggttcccaacgatcaaggcgagttacatgatcccccatgttgtgcaaaaaagcggttagctccttcggtcctccgatcgttgtcagaagtaagttggccgcagtgttatcactcatggttatggcagcactgcataattctcttactgtcatgccatccgtaagatgcttttctgtgactggtgagtactcaaccaagtcattctgagaatagtgtatgcggcgaccgagttgctcttgcccggcgtcaatacgggataatagtgtatcacatagcagaactttaaaagtgctcatcattggaaaacgttcttcggggcgaaaactctcaaggatcttaccgctgttgagatccagttcgatgtaacccactcgtgcacccaactgatcttcagcatcttttactttcaccagcgtttctgggtgagcaaaaacaggaaggcaaaatgccgcaaaaaagggaataagggcgacacggaaatgttgaatactcatactcttcctttttcaatgggtaataactgatataattaaattgaagctctaatttgtgagtttagtatacatgcatttacttataatacagttttttagttttgctggccgcatcttctcaaatatgcttcccagcctgcttttctgtaacgttcaccctctaccttagcatcccttccctttgcaaatagtcctcttccaacaataataatgtcagatcctgtagagaccacatcatccacggttctatactgttgacccaatgcgtctcccttgtcatctaaacccacaccgggtgtcataatcaaccaatcgtaaccttcatctcttccacccatgtctctttgagcaataaagccgataacaaaatctttgtcgctcttcgcaatgtcaacagtacccttagtatattctccagtagatagggagcccttgcatgacaattctgctaacatcaaaaggcctctaggttcctttgttacttcttctgccgcctgcttcaaaccgctaacaatacctgggcccaccacaccgtgtgcattcgtaatgtctgcccattctgctattctgtatacacccgcagagtactgcaatttgactgtattaccaatgtcagcaaattttctgtcttcg

SEQ ID NO: 38 - DNA, 7266 bp, Artificial Sequence
  OXC154-R3G(=GGG)/L21G/S60T
aagagtaaaaaattgtacttggcggataatgcctttagcggcttaactgtgccctccatggaaaaatcagtcaagatatccacatgtgtttttagtaaacaaattttgggacctaatgcttcaactaactccagtaattccttggtggtacgaacatccaatgaagcacacaagtttgtttgcttttcgtgcatgatattaaatagcttggcagcaacaggactaggatgagtagcagcacgttccttatatgtagctttcgacatgatttatcttcgtttcctgcaggtttttgttctgtgcagttgggttaagaatactgggcaatttcatgtttcttcaacactacatatgcgtatatataccaatctaagtctgtgctccttccttcgttcttccttctgttcggagattaccgaatcaaaaaaatttcaaagaaaccgaaatcaaaaaaaagaataaaaaaaaaatgatgaattgaattgaaaagctagcttatcgatgataagctgtcaaagatgagaattaattccacggactatagactatactagatactccgtctactgtacgatacacttccgctcaggtccttgtcctttaacgaggccttaccactcttttgttactctattgatccagctcagcaaaggcagtgtgatctaagattctatcttcgcgatgtagtaaaactagctagaccgagaaagagactagaaatgcaaaaggcacttctacaatggctgccatcattattatccgatgtgacgctgcagcttctcaatgatattcgaatacgctttgaggagatacagcctaatatccgacaaactgttttacagatttacgatcgtacttgttacccatcattgaattttgaacatccgaacctgggagttttccctgaaacagatagtatatttgaacctgtataataatatatagtctagcgctttacggaagacaatgtatgtatttcggttcctggagaaactattgcatctattgcataggtaatcttgcacgtcgcatccccggttcattttctgcgtttccatcttgcacttcaatagcatatctttgttcgcttgcctgtaacttacacgcgcctcgtatcttttaatgatggaataatttgggaatttactctgtgtttatttatttttatgttttgtatttggattttagaaagtaaataaagaaggtagaagagttacggaatgaagaaaaaaaaataaacaaaggtttaaaaaatttcaacaaaaagcgtactttacatatatatttattagacaagaaaagcagattaaatagatatacattcgattaacgataagtaaaatgtaaaatcacaggattttcgtgtgtggtcttctacacagacaagatgaaacaattcggcattaatacctgagagcaggaagagcaagataaaaggtagtatttgttggcgatccccctagagtcttttacatcttcggaaaacaaaaactattttttctttaatttctttttttactttctatttttaatttatatatttatattaaaaaatttaaattataattatttttatagcacgtgatgaaaaggaccgggaagctccaccccggttgataatcagaaaagccccaaaaacaggaagattgtataagcaaatatttaaattgtaaacgttaatattttgttaaaattcgcgttaaatttttgttaaatcagctcattttttaacgaatagcccgaaatcggcaaaatcccttataaatcaaaagaatagaccgagatagggttgagtgttgttccagtttccaacaagagtccactattaaagaacgtggactccaacgtcaaagggcgaaaaagggtctatcagggcgatggcccactacgtgaaccatcaccctaatcaagttttttggggtcgaggtgccgtaaagcagtaaatcggaagggtaaacggatgcccccatttagagcttgacggggaaagccggcgaacgtggcgagaaaggaagggaagaaagcgaaaggagcgggggctagggcggtgggaagtgtaggggtcacgctgggcgtaaccaccacacccgccgcgcttaatggggcgctacagggcgcgtggggatgatccactagtacggattagaagccgccgagcgggtgacagccctccgaaggaagactctcctccgtgcgtcctcgtcttcaccggtcgcgttcctgaaacgcagatgtgcctcgcgccgcactgctccgaacaataaagattctacaatactagcttttatggttatgaagaggaaaaattggcagtaacctggccccacaaaccttcaaatgaacgaatcaaattaacaaccataggatgataatgcgattagttttttagccttatttctggggtaattaatcagcgaagcgatgatttttgatctattaacagatatataaatgcaaaaactgcataaccactttaactaatactttcaacattttcggtttgtattacttcttattcaaatgtaataaaagtatcaacaaaaaattgttaatatacctctatactttaacgtcaaggagaaaaaaccccggatcggactactagcagctgtaatacgactcactatagggaatattaagcttaaacaatgaggcaggtttggttctcttggattgtgggattgttcctatgttttttcaacgtgtcttctgctgctccagtcaacactacaacagaagatgaaacggcacaaattccggctgaagctgtcatcggttactcagatttagaaggggatttcgatgttgctgttttgccattttccaacagcacaaataacgggttattgtttataaatactactattgccagcattgctgctaaagaagaaggggtatctctcgagaaaagagaggctgaagctatgccaggggaaaacttcttgaagtgcttctcccaatatatcccaaacaacgctactaacgggaagttagtttacactcaaaacaatccattatacatgtctgtcttaaactctactattcataacttaagatttacttccgatactacccctaagccattggttatcgtcaccccaacgcacgtctcccatatccaaggtactatcttatgttctaagaaggttggtttgcaaatccgtactagatctggtggtcacgactctgaaggtatgtcctatatctctcaagtcccatttgtcattgttgacttaagaaatatgagatccattaaaattgatgttcattctcaaactgcttgggtcgaagctggtgccaccttgggtgaagtttactactgggtcaacgaaaaaaacgaaaacttatctttagctgccggttactgtccaaccgtctgtgctggtggtcatttcggtggtggtggttacggtccattgatgcgtaactacggtttagctgctgacaacattattgacgctcatttagttaatgttcacggtaaggttttggacagaaaatctatgggtgaagatttattttgggccttgagaggtggtggtgctgaatccttcggtatcatcgttgcctggaagattcgtttagttgctgtcccttctaagtccaccatgttctccgtcaagaaaatcatggaaattcatgagttggtcaaattggttaacaagtggcaaaacatcgcttacaagtatgacaaggatttgttgttaatgactcacttcatcacccgtaatatcaccgacaaccaaggtaagaacaaaactgctattcacacctacttctcctccgtttttttgggtggtgtcgactccttagtcgatttgatgaacaaatcctttccagaattgggtattaagaaaactgattgtagacaattgtcttggattgacaccattatcttctattctggtgtcgttaactacgacaccgacaactttaacaaggaaattttgttggatcgttctgctggtcaaaatggtgccttcaaaatcaaattggactacgtcaaaaagccaatcccagaatctgttttcgttcaaattttggaaaagttgtacgaagaagacattggtgccggtatgtatgctttgtatccatatggtggtatcatggacgaaatttccgaatctgccatcccattcccacacagagctggtattttatatgaattgtggtacatctgttcttgggaaaagcaagaagacaacgaaaagcatttaaactggattagaaacatttacaacttcatgaccccatacgtttctaagaacccaagattagcctatttgaactaccgtgacttagatattggtattaatgacccaaagaacccaaacaactatactcaagccagaatttggggtgaaaagtacttcggtaagaacttcgatagattagttaaggttaaaactttggtcgatccaaacaacttcttcagaaacgaacaatccatcccaccattgccaagacatcgtcacggccatcatcaccatcaccattagctcgagcatgcatctagagggccgcatcatgtaattagttatgtcacgcttacattcacgccctccccccacatccgctctaaccgaaaaggaaggagttagacaacctgaagtctaggtccctatttatttttttatagttatgttagtattaagaacgttatttatatttcaaatttttcttttttttctgtacagacgcgtgtacgcatgtaacattatactgaaaaccttgcttgagaaggttttgggacgctcgaaggctttaatttgcggccctgcattaatgaatcggccaacgcgcggggagaggcggtttgcgtattgggcgctcttccgcttcctcgctcactgactcgctgcgctcggtcgttcggctgcggcgagcggtatcagctcactcaaaggcggtaatacggttatccacagaatcaggggataacgcaggaaagaacatgtgagcaaaaggccagcaaaagcccaggaaccgtaaaaaggccgcgttgctggcgtttttccataggctccgcccccctgacgagcatcacaaaaatcgacgctcaagtcagaggtggcgaaacccgacaggactataaagataccaggcgtttccccctggaagctccctcgtgcgctctcctgttccgaccctgccgcttaccggatacctgtccgcctttctcccttcgggaagcgtggcgctttctcatagctcacgctgtaggtatctcagttcggtgtaggtcgttcgctccaagctgggctgtgtgcacgaaccccccgttcagcccgaccgctgcgccttatccggtaactatcgtcttgagtccaacccggtaagacacgacttatcgccactggcagcagccactggtaacaggattagcagagcgaggtatgtaggcggtgctacagagttcttgaagtggtggcctaactacggctacactagaagaacagtatttggtatctgcgctctgctgaagccagttaccttcggaaaaagagttggtagctcttgatccggcaaacaaaccaccgctggtagcggtggtttttttgtttgcaagcagcagattacgcgcagaaaaaaaggatctcaagaagatcctttgatcttttctacggggtctgacgctcagtggaacgaaaactcacgttaagggattttggtcatgagattatcaaaaaggatcttcacctagatccttttaaattaaaaatgaagttttaaatcaatctaaagtatatatgagtaaacttggtctgacagttaccaatgcttaatcagtgaggcacctatctcagcgatctgtctatttcgttcatccatagttgcctgactccccgtcgtgtagataactacgatacgggagcgcttaccatctggccccagtgctgcaatgataccgcgagacccacgctcaccggctccagatttatcagcaataaaccagccagccggaagggccgagcgcagaagtggtcctgcaactttatccgcctccattcagtctattaattgttgccgggaagctagagtaagtagttcgccagttaatagtttgcgcaacgttgttggcattgctacaggcatcgtggtgtcactctcgtcgtttggtatggcttcattcagctccggttcccaacgatcaaggcgagttacatgatcccccatgttgtgcaaaaaagcggttagctccttcggtcctccgatcgttgtcagaagtaagttggccgcagtgttatcactcatggttatggcagcactgcataattctcttactgtcatgccatccgtaagatgcttttctgtgactggtgagtactcaaccaagtcattctgagaatagtgtatgcggcgaccgagttgctcttgcccggcgtcaatacgggataatagtgtatcacatagcagaactttaaaagtgctcatcattggaaaacgttcttcggggcgaaaactctcaaggatcttaccgctgttgagatccagttcgatgtaacccactcgtgcacccaactgatcttcagcatcttttactttcaccagcgtttctgggtgagcaaaaacaggaaggcaaaatgccgcaaaaaagggaataagggcgacacggaaatgttgaatactcatactcttcctttttcaatgggtaataactgatataattaaattgaagctctaatttgtgagtttagtatacatgcatttacttataatacagttttttagttttgctggccgcatcttctcaaatatgcttcccagcctgcttttctgtaacgttcaccctctaccttagcatcccttccctttgcaaatagtcctcttccaacaataataatgtcagatcctgtagagaccacatcatccacggttctatactgttgacccaatgcgtctcccttgtcatctaaacccacaccgggtgtcataatcaaccaatcgtaaccttcatctcttccacccatgtctctttgagcaataaagccgataacaaaatctttgtcgctcttcgcaatgtcaacagtacccttagtatattctccagtagatagggagcccttgcatgacaattctgctaacatcaaaaggcctctaggttcctttgttacttcttctgccgcctgcttcaaaccgctaacaatacctgggcccaccacaccgtgtgcattcgtaatgtctgcccattctgctattctgtatacacccgcagagtactgcaatttgactgtattaccaatgtcagcaaattttctgtcttcg

SEQ ID NO: 39 - DNA, 7266 bp, Artificial Sequence
  OXC154-R3T/L21G/T49R/S88A(=GCT)
aagagtaaaaaattgtacttggcggataatgcctttagcggcttaactgtgccctccatggaaaaatcagtcaagatatccacatgtgtttttagtaaacaaattttgggacctaatgcttcaactaactccagtaattccttggtggtacgaacatccaatgaagcacacaagtttgtttgcttttcgtgcatgatattaaatagcttggcagcaacaggactaggatgagtagcagcacgttccttatatgtagctttcgacatgatttatcttcgtttcctgcaggtttttgttctgtgcagttgggttaagaatactgggcaatttcatgtttcttcaacactacatatgcgtatatataccaatctaagtctgtgctccttccttcgttcttccttctgttcggagattaccgaatcaaaaaaatttcaaagaaaccgaaatcaaaaaaaagaataaaaaaaaaatgatgaattgaattgaaaagctagcttatcgatgataagctgtcaaagatgagaattaattccacggactatagactatactagatactccgtctactgtacgatacacttccgctcaggtccttgtcctttaacgaggccttaccactcttttgttactctattgatccagctcagcaaaggcagtgtgatctaagattctatcttcgcgatgtagtaaaactagctagaccgagaaagagactagaaatgcaaaaggcacttctacaatggctgccatcattattatccgatgtgacgctgcagcttctcaatgatattcgaatacgctttgaggagatacagcctaatatccgacaaactgttttacagatttacgatcgtacttgttacccatcattgaattttgaacatccgaacctgggagttttccctgaaacagatagtatatttgaacctgtataataatatatagtctagcgctttacggaagacaatgtatgtatttcggttcctggagaaactattgcatctattgcataggtaatcttgcacgtcgcatccccggttcattttctgcgtttccatcttgcacttcaatagcatatctttgttcgcttgcctgtaacttacacgcgcctcgtatcttttaatgatggaataatttgggaatttactctgtgtttatttatttttatgttttgtatttggattttagaaagtaaataaagaaggtagaagagttacggaatgaagaaaaaaaaataaacaaaggtttaaaaaatttcaacaaaaagcgtactttacatatatatttattagacaagaaaagcagattaaatagatatacattcgattaacgataagtaaaatgtaaaatcacaggattttcgtgtgtggtcttctacacagacaagatgaaacaattcggcattaatacctgagagcaggaagagcaagataaaaggtagtatttgttggcgatccccctagagtcttttacatcttcggaaaacaaaaactattttttctttaatttctttttttactttctatttttaatttatatatttatattaaaaaatttaaattataattatttttatagcacgtgatgaaaaggaccgggaagctccaccccggttgataatcagaaaagccccaaaaacaggaagattgtataagcaaatatttaaattgtaaacgttaatattttgttaaaattcgcgttaaatttttgttaaatcagctcattttttaacgaatagcccgaaatcggcaaaatcccttataaatcaaaagaatagaccgagatagggttgagtgttgttccagtttccaacaagagtccactattaaagaacgtggactccaacgtcaaagggcgaaaaagggtctatcagggcgatggcccactacgtgaaccatcaccctaatcaagttttttggggtcgaggtgccgtaaagcagtaaatcggaagggtaaacggatgcccccatttagagcttgacggggaaagccggcgaacgtggcgagaaaggaagggaagaaagcgaaaggagcgggggctagggcggtgggaagtgtaggggtcacgctgggcgtaaccaccacacccgccgcgcttaatggggcgctacagggcgcgtggggatgatccactagtacggattagaagccgccgagcgggtgacagccctccgaaggaagactctcctccgtgcgtcctcgtcttcaccggtcgcgttcctgaaacgcagatgtgcctcgcgccgcactgctccgaacaataaagattctacaatactagcttttatggttatgaagaggaaaaattggcagtaacctggccccacaaaccttcaaatgaacgaatcaaattaacaaccataggatgataatgcgattagttttttagccttatttctggggtaattaatcagcgaagcgatgatttttgatctattaacagatatataaatgcaaaaactgcataaccactttaactaatactttcaacattttcggtttgtattacttcttattcaaatgtaataaaagtatcaacaaaaaattgttaatatacctctatactttaacgtcaaggagaaaaaaccccggatcggactactagcagctgtaatacgactcactatagggaatattaagcttaaacaatgaggcaggtttggttctcttggattgtgggattgttcctatgttttttcaacgtgtcttctgctgctccagtcaacactacaacagaagatgaaacggcacaaattccggctgaagctgtcatcggttactcagatttagaaggggatttcgatgttgctgttttgccattttccaacagcacaaataacgggttattgtttataaatactactattgccagcattgctgctaaagaagaaggggtatctctcgagaaaagagaggctgaagctatgccaacggaaaacttcttgaagtgcttctcccaatatatcccaaacaacgctactaacgggaagttagtttacactcaaaacaatccattatacatgtctgtcttaaactctactattcataacttaagatttacttccgatcggacccctaagccattggttatcgtcaccccatctcacgtctcccatatccaaggtactatcttatgttctaagaaggttggtttgcaaatccgtactagatctggtggtcacgacgctgaaggtatgtcctatatctctcaagtcccatttgtcattgttgacttaagaaatatgagatccattaaaattgatgttcattctcaaactgcttgggtcgaagctggtgccaccttgggtgaagtttactactgggtcaacgaaaaaaacgaaaacttatctttagctgccggttactgtccaaccgtctgtgctggtggtcatttcggtggtggtggttacggtccattgatgcgtaactacggtttagctgctgacaacattattgacgctcatttagttaatgttcacggtaaggttttggacagaaaatctatgggtgaagatttattttgggccttgagaggtggtggtgctgaatccttcggtatcatcgttgcctggaagattcgtttagttgctgtcccttctaagtccaccatgttctccgtcaagaaaatcatggaaattcatgagttggtcaaattggttaacaagtggcaaaacatcgcttacaagtatgacaaggatttgttgttaatgactcacttcatcacccgtaatatcaccgacaaccaaggtaagaacaaaactgctattcacacctacttctcctccgtttttttgggtggtgtcgactccttagtcgatttgatgaacaaatcctttccagaattgggtattaagaaaactgattgtagacaattgtcttggattgacaccattatcttctattctggtgtcgttaactacgacaccgacaactttaacaaggaaattttgttggatcgttctgctggtcaaaatggtgccttcaaaatcaaattggactacgtcaaaaagccaatcccagaatctgttttcgttcaaattttggaaaagttgtacgaagaagacattggtgccggtatgtatgctttgtatccatatggtggtatcatggacgaaatttccgaatctgccatcccattcccacacagagctggtattttatatgaattgtggtacatctgttcttgggaaaagcaagaagacaacgaaaagcatttaaactggattagaaacatttacaacttcatgaccccatacgtttctaagaacccaagattagcctatttgaactaccgtgacttagatattggtattaatgacccaaagaacccaaacaactatactcaagccagaatttggggtgaaaagtacttcggtaagaacttcgatagattagttaaggttaaaactttggtcgatccaaacaacttcttcagaaacgaacaatccatcccaccattgccaagacatcgtcacggccatcatcaccatcaccattagctcgagcatgcatctagagggccgcatcatgtaattagttatgtcacgcttacattcacgccctccccccacatccgctctaaccgaaaaggaaggagttagacaacctgaagtctaggtccctatttatttttttatagttatgttagtattaagaacgttatttatatttcaaatttttcttttttttctgtacagacgcgtgtacgcatgtaacattatactgaaaaccttgcttgagaaggttttgggacgctcgaaggctttaatttgcggccctgcattaatgaatcggccaacgcgcggggagaggcggtttgcgtattgggcgctcttccgcttcctcgctcactgactcgctgcgctcggtcgttcggctgcggcgagcggtatcagctcactcaaaggcggtaatacggttatccacagaatcaggggataacgcaggaaagaacatgtgagcaaaaggccagcaaaagcccaggaaccgtaaaaaggccgcgttgctggcgtttttccataggctccgcccccctgacgagcatcacaaaaatcgacgctcaagtcagaggtggcgaaacccgacaggactataaagataccaggcgtttccccctggaagctccctcgtgcgctctcctgttccgaccctgccgcttaccggatacctgtccgcctttctcccttcgggaagcgtggcgctttctcatagctcacgctgtaggtatctcagttcggtgtaggtcgttcgctccaagctgggctgtgtgcacgaaccccccgttcagcccgaccgctgcgccttatccggtaactatcgtcttgagtccaacccggtaagacacgacttatcgccactggcagcagccactggtaacaggattagcagagcgaggtatgtaggcggtgctacagagttcttgaagtggtggcctaactacggctacactagaagaacagtatttggtatctgcgctctgctgaagccagttaccttcggaaaaagagttggtagctcttgatccggcaaacaaaccaccgctggtagcggtggtttttttgtttgcaagcagcagattacgcgcagaaaaaaaggatctcaagaagatcctttgatcttttctacggggtctgacgctcagtggaacgaaaactcacgttaagggattttggtcatgagattatcaaaaaggatcttcacctagatccttttaaattaaaaatgaagttttaaatcaatctaaagtatatatgagtaaacttggtctgacagttaccaatgcttaatcagtgaggcacctatctcagcgatctgtctatttcgttcatccatagttgcctgactccccgtcgtgtagataactacgatacgggagcgcttaccatctggccccagtgctgcaatgataccgcgagacccacgctcaccggctccagatttatcagcaataaaccagccagccggaagggccgagcgcagaagtggtcctgcaactttatccgcctccattcagtctattaattgttgccgggaagctagagtaagtagttcgccagttaatagtttgcgcaacgttgttggcattgctacaggcatcgtggtgtcactctcgtcgtttggtatggcttcattcagctccggttcccaacgatcaaggcgagttacatgatcccccatgttgtgcaaaaaagcggttagctccttcggtcctccgatcgttgtcagaagtaagttggccgcagtgttatcactcatggttatggcagcactgcataattctcttactgtcatgccatccgtaagatgcttttctgtgactggtgagtactcaaccaagtcattctgagaatagtgtatgcggcgaccgagttgctcttgcccggcgtcaatacgggataatagtgtatcacatagcagaactttaaaagtgctcatcattggaaaacgttcttcggggcgaaaactctcaaggatcttaccgctgttgagatccagttcgatgtaacccactcgtgcacccaactgatcttcagcatcttttactttcaccagcgtttctgggtgagcaaaaacaggaaggcaaaatgccgcaaaaaagggaataagggcgacacggaaatgttgaatactcatactcttcctttttcaatgggtaataactgatataattaaattgaagctctaatttgtgagtttagtatacatgcatttacttataatacagttttttagttttgctggccgcatcttctcaaatatgcttcccagcctgcttttctgtaacgttcaccctctaccttagcatcccttccctttgcaaatagtcctcttccaacaataataatgtcagatcctgtagagaccacatcatccacggttctatactgttgacccaatgcgtctcccttgtcatctaaacccacaccgggtgtcataatcaaccaatcgtaaccttcatctcttccacccatgtctctttgagcaataaagccgataacaaaatctttgtcgctcttcgcaatgtcaacagtacccttagtatattctccagtagatagggagcccttgcatgacaattctgctaacatcaaaaggcctctaggttcctttgttacttcttctgccgcctgcttcaaaccgctaacaatacctgggcccaccacaccgtgtgcattcgtaatgtctgcccattctgctattctgtatacacccgcagagtactgcaatttgactgtattaccaatgtcagcaaattttctgtcttcg

SEQ ID NO: 40 - DNA, 7266 bp, Artificial Sequence
  OXC154-R3T/L21G/S60T
aagagtaaaaaattgtacttggcggataatgcctttagcggcttaactgtgccctccatggaaaaatcagtcaagatatccacatgtgtttttagtaaacaaattttgggacctaatgcttcaactaactccagtaattccttggtggtacgaacatccaatgaagcacacaagtttgtttgcttttcgtgcatgatattaaatagcttggcagcaacaggactaggatgagtagcagcacgttccttatatgtagctttcgacatgatttatcttcgtttcctgcaggtttttgttctgtgcagttgggttaagaatactgggcaatttcatgtttcttcaacactacatatgcgtatatataccaatctaagtctgtgctccttccttcgttcttccttctgttcggagattaccgaatcaaaaaaatttcaaagaaaccgaaatcaaaaaaaagaataaaaaaaaaatgatgaattgaattgaaaagctagcttatcgatgataagctgtcaaagatgagaattaattccacggactatagactatactagatactccgtctactgtacgatacacttccgctcaggtccttgtcctttaacgaggccttaccactcttttgttactctattgatccagctcagcaaaggcagtgtgatctaagattctatcttcgcgatgtagtaaaactagctagaccgagaaagagactagaaatgcaaaaggcacttctacaatggctgccatcattattatccgatgtgacgctgcagcttctcaatgatattcgaatacgctttgaggagatacagcctaatatccgacaaactgttttacagatttacgatcgtacttgttacccatcattgaattttgaacatccgaacctgggagttttccctgaaacagatagtatatttgaacctgtataataatatatagtctagcgctttacggaagacaatgtatgtatttcggttcctggagaaactattgcatctattgcataggtaatcttgcacgtcgcatccccggttcattttctgcgtttccatcttgcacttcaatagcatatctttgttcgcttgcctgtaacttacacgcgcctcgtatcttttaatgatggaataatttgggaatttactctgtgtttatttatttttatgttttgtatttggattttagaaagtaaataaagaaggtagaagagttacggaatgaagaaaaaaaaataaacaaaggtttaaaaaatttcaacaaaaagcgtactttacatatatatttattagacaagaaaagcagattaaatagatatacattcgattaacgataagtaaaatgtaaaatcacaggattttcgtgtgtggtcttctacacagacaagatgaaacaattcggcattaatacctgagagcaggaagagcaagataaaaggtagtatttgttggcgatccccctagagtcttttacatcttcggaaaacaaaaactattttttctttaatttctttttttactttctatttttaatttatatatttatattaaaaaatttaaattataattatttttatagcacgtgatgaaaaggaccgggaagctccaccccggttgataatcagaaaagccccaaaaacaggaagattgtataagcaaatatttaaattgtaaacgttaatattttgttaaaattcgcgttaaatttttgttaaatcagctcattttttaacgaatagcccgaaatcggcaaaatcccttataaatcaaaagaatagaccgagatagggttgagtgttgttccagtttccaacaagagtccactattaaagaacgtggactccaacgtcaaagggcgaaaaagggtctatcagggcgatggcccactacgtgaaccatcaccctaatcaagttttttggggtcgaggtgccgtaaagcagtaaatcggaagggtaaacggatgcccccatttagagcttgacggggaaagccggcgaacgtggcgagaaaggaagggaagaaagcgaaaggagcgggggctagggcggtgggaagtgtaggggtcacgctgggcgtaaccaccacacccgccgcgcttaatggggcgctacagggcgcgtggggatgatccactagtacggattagaagccgccgagcgggtgacagccctccgaaggaagactctcctccgtgcgtcctcgtcttcaccggtcgcgttcctgaaacgcagatgtgcctcgcgccgcactgctccgaacaataaagattctacaatactagcttttatggttatgaagaggaaaaattggcagtaacctggccccacaaaccttcaaatgaacgaatcaaattaacaaccataggatgataatgcgattagttttttagccttatttctggggtaattaatcagcgaagcgatgatttttgatctattaacagatatataaatgcaaaaactgcataaccactttaactaatactttcaacattttcggtttgtattacttcttattcaaatgtaataaaagtatcaacaaaaaattgttaatatacctctatactttaacgtcaaggagaaaaaaccccggatcggactactagcagctgtaatacgactcactatagggaatattaagcttaaacaatgaggcaggtttggttctcttggattgtgggattgttcctatgttttttcaacgtgtcttctgctgctccagtcaacactacaacagaagatgaaacggcacaaattccggctgaagctgtcatcggttactcagatttagaaggggatttcgatgttgctgttttgccattttccaacagcacaaataacgggttattgtttataaatactactattgccagcattgctgctaaagaagaaggggtatctctcgagaaaagagaggctgaagctatgccaacggaaaacttcttgaagtgcttctcccaatatatcccaaacaacgctactaacgggaagttagtttacactcaaaacaatccattatacatgtctgtcttaaactctactattcataacttaagatttacttccgatactacccctaagccattggttatcgtcaccccaacgcacgtctcccatatccaaggtactatcttatgttctaagaaggttggtttgcaaatccgtactagatctggtggtcacgactctgaaggtatgtcctatatctctcaagtcccatttgtcattgttgacttaagaaatatgagatccattaaaattgatgttcattctcaaactgcttgggtcgaagctggtgccaccttgggtgaagtttactactgggtcaacgaaaaaaacgaaaacttatctttagctgccggttactgtccaaccgtctgtgctggtggtcatttcggtggtggtggttacggtccattgatgcgtaactacggtttagctgctgacaacattattgacgctcatttagttaatgttcacggtaaggttttggacagaaaatctatgggtgaagatttattttgggccttgagaggtggtggtgctgaatccttcggtatcatcgttgcctggaagattcgtttagttgctgtcccttctaagtccaccatgttctccgtcaagaaaatcatggaaattcatgagttggtcaaattggttaacaagtggcaaaacatcgcttacaagtatgacaaggatttgttgttaatgactcacttcatcacccgtaatatcaccgacaaccaaggtaagaacaaaactgctattcacacctacttctcctccgtttttttgggtggtgtcgactccttagtcgatttgatgaacaaatcctttccagaattgggtattaagaaaactgattgtagacaattgtcttggattgacaccattatcttctattctggtgtcgttaactacgacaccgacaactttaacaaggaaattttgttggatcgttctgctggtcaaaatggtgccttcaaaatcaaattggactacgtcaaaaagccaatcccagaatctgttttcgttcaaattttggaaaagttgtacgaagaagacattggtgccggtatgtatgctttgtatccatatggtggtatcatggacgaaatttccgaatctgccatcccattcccacacagagctggtattttatatgaattgtggtacatctgttcttgggaaaagcaagaagacaacgaaaagcatttaaactggattagaaacatttacaacttcatgaccccatacgtttctaagaacccaagattagcctatttgaactaccgtgacttagatattggtattaatgacccaaagaacccaaacaactatactcaagccagaatttggggtgaaaagtacttcggtaagaacttcgatagattagttaaggttaaaactttggtcgatccaaacaacttcttcagaaacgaacaatccatcccaccattgccaagacatcgtcacggccatcatcaccatcaccattagctcgagcatgcatctagagggccgcatcatgtaattagttatgtcacgcttacattcacgccctccccccacatccgctctaaccgaaaaggaaggagttagacaacctgaagtctaggtccctatttatttttttatagttatgttagtattaagaacgttatttatatttcaaatttttcttttttttctgtacagacgcgtgtacgcatgtaacattatactgaaaaccttgcttgagaaggttttgggacgctcgaaggctttaatttgcggccctgcattaatgaatcggccaacgcgcggggagaggcggtttgcgtattgggcgctcttccgcttcctcgctcactgactcgctgcgctcggtcgttcggctgcggcgagcggtatcagctcactcaaaggcggtaatacggttatccacagaatcaggggataacgcaggaaagaacatgtgagcaaaaggccagcaaaagcccaggaaccgtaaaaaggccgcgttgctggcgtttttccataggctccgcccccctgacgagcatcacaaaaatcgacgctcaagtcagaggtggcgaaacccgacaggactataaagataccaggcgtttccccctggaagctccctcgtgcgctctcctgttccgaccctgccgcttaccggatacctgtccgcctttctcccttcgggaagcgtggcgctttctcatagctcacgctgtaggtatctcagttcggtgtaggtcgttcgctccaagctgggctgtgtgcacgaaccccccgttcagcccgaccgctgcgccttatccggtaactatcgtcttgagtccaacccggtaagacacgacttatcgccactggcagcagccactggtaacaggattagcagagcgaggtatgtaggcggtgctacagagttcttgaagtggtggcctaactacggctacactagaagaacagtatttggtatctgcgctctgctgaagccagttaccttcggaaaaagagttggtagctcttgatccggcaaacaaaccaccgctggtagcggtggtttttttgtttgcaagcagcagattacgcgcagaaaaaaaggatctcaagaagatcctttgatcttttctacggggtctgacgctcagtggaacgaaaactcacgttaagggattttggtcatgagattatcaaaaaggatcttcacctagatccttttaaattaaaaatgaagttttaaatcaatctaaagtatatatgagtaaacttggtctgacagttaccaatgcttaatcagtgaggcacctatctcagcgatctgtctatttcgttcatccatagttgcctgactccccgtcgtgtagataactacgatacgggagcgcttaccatctggccccagtgctgcaatgataccgcgagacccacgctcaccggctccagatttatcagcaataaaccagccagccggaagggccgagcgcagaagtggtcctgcaactttatccgcctccattcagtctattaattgttgccgggaagctagagtaagtagttcgccagttaatagtttgcgcaacgttgttggcattgctacaggcatcgtggtgtcactctcgtcgtttggtatggcttcattcagctccggttcccaacgatcaaggcgagttacatgatcccccatgttgtgcaaaaaagcggttagctccttcggtcctccgatcgttgtcagaagtaagttggccgcagtgttatcactcatggttatggcagcactgcataattctcttactgtcatgccatccgtaagatgcttttctgtgactggtgagtactcaaccaagtcattctgagaatagtgtatgcggcgaccgagttgctcttgcccggcgtcaatacgggataatagtgtatcacatagcagaactttaaaagtgctcatcattggaaaacgttcttcggggcgaaaactctcaaggatcttaccgctgttgagatccagttcgatgtaacccactcgtgcacccaactgatcttcagcatcttttactttcaccagcgtttctgggtgagcaaaaacaggaaggcaaaatgccgcaaaaaagggaataagggcgacacggaaatgttgaatactcatactcttcctttttcaatgggtaataactgatataattaaattgaagctctaatttgtgagtttagtatacatgcatttacttataatacagttttttagttttgctggccgcatcttctcaaatatgcttcccagcctgcttttctgtaacgttcaccctctaccttagcatcccttccctttgcaaatagtcctcttccaacaataataatgtcagatcctgtagagaccacatcatccacggttctatactgttgacccaatgcgtctcccttgtcatctaaacccacaccgggtgtcataatcaaccaatcgtaaccttcatctcttccacccatgtctctttgagcaataaagccgataacaaaatctttgtcgctcttcgcaatgtcaacagtacccttagtatattctccagtagatagggagcccttgcatgacaattctgctaacatcaaaaggcctctaggttcctttgttacttcttctgccgcctgcttcaaaccgctaacaatacctgggcccaccacaccgtgtgcattcgtaatgtctgcccattctgctattctgtatacacccgcagagtactgcaatttgactgtattaccaatgtcagcaaattttctgtcttcg

SEQ ID NO: 41 - DNA, 7266 bp, Artificial Sequence
  OXC154-R3W/L21G/S88A(=GCT)
aagagtaaaaaattgtacttggcggataatgcctttagcggcttaactgtgccctccatggaaaaatcagtcaagatatccacatgtgtttttagtaaacaaattttgggacctaatgcttcaactaactccagtaattccttggtggtacgaacatccaatgaagcacacaagtttgtttgcttttcgtgcatgatattaaatagcttggcagcaacaggactaggatgagtagcagcacgttccttatatgtagctttcgacatgatttatcttcgtttcctgcaggtttttgttctgtgcagttgggttaagaatactgggcaatttcatgtttcttcaacactacatatgcgtatatataccaatctaagtctgtgctccttccttcgttcttccttctgttcggagattaccgaatcaaaaaaatttcaaagaaaccgaaatcaaaaaaaagaataaaaaaaaaatgatgaattgaattgaaaagctagcttatcgatgataagctgtcaaagatgagaattaattccacggactatagactatactagatactccgtctactgtacgatacacttccgctcaggtccttgtcctttaacgaggccttaccactcttttgttactctattgatccagctcagcaaaggcagtgtgatctaagattctatcttcgcgatgtagtaaaactagctagaccgagaaagagactagaaatgcaaaaggcacttctacaatggctgccatcattattatccgatgtgacgctgcagcttctcaatgatattcgaatacgctttgaggagatacagcctaatatccgacaaactgttttacagatttacgatcgtacttgttacccatcattgaattttgaacatccgaacctgggagttttccctgaaacagatagtatatttgaacctgtataataatatatagtctagcgctttacggaagacaatgtatgtatttcggttcctggagaaactattgcatctattgcataggtaatcttgcacgtcgcatccccggttcattttctgcgtttccatcttgcacttcaatagcatatctttgttcgcttgcctgtaacttacacgcgcctcgtatcttttaatgatggaataatttgggaatttactctgtgtttatttatttttatgttttgtatttggattttagaaagtaaataaagaaggtagaagagttacggaatgaagaaaaaaaaataaacaaaggtttaaaaaatttcaacaaaaagcgtactttacatatatatttattagacaagaaaagcagattaaatagatatacattcgattaacgataagtaaaatgtaaaatcacaggattttcgtgtgtggtcttctacacagacaagatgaaacaattcggcattaatacctgagagcaggaagagcaagataaaaggtagtatttgttggcgatccccctagagtcttttacatcttcggaaaacaaaaactattttttctttaatttctttttttactttctatttttaatttatatatttatattaaaaaatttaaattataattatttttatagcacgtgatgaaaaggaccgggaagctccaccccggttgataatcagaaaagccccaaaaacaggaagattgtataagcaaatatttaaattgtaaacgttaatattttgttaaaattcgcgttaaatttttgttaaatcagctcattttttaacgaatagcccgaaatcggcaaaatcccttataaatcaaaagaatagaccgagatagggttgagtgttgttccagtttccaacaagagtccactattaaagaacgtggactccaacgtcaaagggcgaaaaagggtctatcagggcgatggcccactacgtgaaccatcaccctaatcaagttttttggggtcgaggtgccgtaaagcagtaaatcggaagggtaaacggatgcccccatttagagcttgacggggaaagccggcgaacgtggcgagaaaggaagggaagaaagcgaaaggagcgggggctagggcggtgggaagtgtaggggtcacgctgggcgtaaccaccacacccgccgcgcttaatggggcgctacagggcgcgtggggatgatccactagtacggattagaagccgccgagcgggtgacagccctccgaaggaagactctcctccgtgcgtcctcgtcttcaccggtcgcgttcctgaaacgcagatgtgcctcgcgccgcactgctccgaacaataaagattctacaatactagcttttatggttatgaagaggaaaaattggcagtaacctggccccacaaaccttcaaatgaacgaatcaaattaacaaccataggatgataatgcgattagttttttagccttatttctggggtaattaatcagcgaagcgatgatttttgatctattaacagatatataaatgcaaaaactgcataaccactttaactaatactttcaacattttcggtttgtattacttcttattcaaatgtaataaaagtatcaacaaaaaattgttaatatacctctatactttaacgtcaaggagaaaaaaccccggatcggactactagcagctgtaatacgactcactatagggaatattaagcttaaacaatgaggcaggtttggttctcttggattgtgggattgttcctatgttttttcaacgtgtcttctgctgctccagtcaacactacaacagaagatgaaacggcacaaattccggctgaagctgtcatcggttactcagatttagaaggggatttcgatgttgctgttttgccattttccaacagcacaaataacgggttattgtttataaatactactattgccagcattgctgctaaagaagaaggggtatctctcgagaaaagagaggctgaagctatgccatgggaaaacttcttgaagtgcttctcccaatatatcccaaacaacgctactaacgggaagttagtttacactcaaaacaatccattatacatgtctgtcttaaactctactattcataacttaagatttacttccgatactacccctaagccattggttatcgtcaccccatctcacgtctcccatatccaaggtactatcttatgttctaagaaggttggtttgcaaatccgtactagatctggtggtcacgacgctgaaggtatgtcctatatctctcaagtcccatttgtcattgttgacttaagaaatatgagatccattaaaattgatgttcattctcaaactgcttgggtcgaagctggtgccaccttgggtgaagtttactactgggtcaacgaaaaaaacgaaaacttatctttagctgccggttactgtccaaccgtctgtgctggtggtcatttcggtggtggtggttacggtccattgatgcgtaactacggtttagctgctgacaacattattgacgctcatttagttaatgttcacggtaaggttttggacagaaaatctatgggtgaagatttattttgggccttgagaggtggtggtgctgaatccttcggtatcatcgttgcctggaagattcgtttagttgctgtcccttctaagtccaccatgttctccgtcaagaaaatcatggaaattcatgagttggtcaaattggttaacaagtggcaaaacatcgcttacaagtatgacaaggatttgttgttaatgactcacttcatcacccgtaatatcaccgacaaccaaggtaagaacaaaactgctattcacacctacttctcctccgtttttttgggtggtgtcgactccttagtcgatttgatgaacaaatcctttccagaattgggtattaagaaaactgattgtagacaattgtcttggattgacaccattatcttctattctggtgtcgttaactacgacaccgacaactttaacaaggaaattttgttggatcgttctgctggtcaaaatggtgccttcaaaatcaaattggactacgtcaaaaagccaatcccagaatctgttttcgttcaaattttggaaaagttgtacgaagaagacattggtgccggtatgtatgctttgtatccatatggtggtatcatggacgaaatttccgaatctgccatcccattcccacacagagctggtattttatatgaattgtggtacatctgttcttgggaaaagcaagaagacaacgaaaagcatttaaactggattagaaacatttacaacttcatgaccccatacgtttctaagaacccaagattagcctatttgaactaccgtgacttagatattggtattaatgacccaaagaacccaaacaactatactcaagccagaatttggggtgaaaagtacttcggtaagaacttcgatagattagttaaggttaaaactttggtcgatccaaacaacttcttcagaaacgaacaatccatcccaccattgccaagacatcgtcacggccatcatcaccatcaccattagctcgagcatgcatctagagggccgcatcatgtaattagttatgtcacgcttacattcacgccctccccccacatccgctctaaccgaaaaggaaggagttagacaacctgaagtctaggtccctatttatttttttatagttatgttagtattaagaacgttatttatatttcaaatttttcttttttttctgtacagacgcgtgtacgcatgtaacattatactgaaaaccttgcttgagaaggttttgggacgctcgaaggctttaatttgcggccctgcattaatgaatcggccaacgcgcggggagaggcggtttgcgtattgggcgctcttccgcttcctcgctcactgactcgctgcgctcggtcgttcggctgcggcgagcggtatcagctcactcaaaggcggtaatacggttatccacagaatcaggggataacgcaggaaagaacatgtgagcaaaaggccagcaaaagcccaggaaccgtaaaaaggccgcgttgctggcgtttttccataggctccgcccccctgacgagcatcacaaaaatcgacgctcaagtcagaggtggcgaaacccgacaggactataaagataccaggcgtttccccctggaagctccctcgtgcgctctcctgttccgaccctgccgcttaccggatacctgtccgcctttctcccttcgggaagcgtggcgctttctcatagctcacgctgtaggtatctcagttcggtgtaggtcgttcgctccaagctgggctgtgtgcacgaaccccccgttcagcccgaccgctgcgccttatccggtaactatcgtcttgagtccaacccggtaagacacgacttatcgccactggcagcagccactggtaacaggattagcagagcgaggtatgtaggcggtgctacagagttcttgaagtggtggcctaactacggctacactagaagaacagtatttggtatctgcgctctgctgaagccagttaccttcggaaaaagagttggtagctcttgatccggcaaacaaaccaccgctggtagcggtggtttttttgtttgcaagcagcagattacgcgcagaaaaaaaggatctcaagaagatcctttgatcttttctacggggtctgacgctcagtggaacgaaaactcacgttaagggattttggtcatgagattatcaaaaaggatcttcacctagatccttttaaattaaaaatgaagttttaaatcaatctaaagtatatatgagtaaacttggtctgacagttaccaatgcttaatcagtgaggcacctatctcagcgatctgtctatttcgttcatccatagttgcctgactccccgtcgtgtagataactacgatacgggagcgcttaccatctggccccagtgctgcaatgataccgcgagacccacgctcaccggctccagatttatcagcaataaaccagccagccggaagggccgagcgcagaagtggtcctgcaactttatccgcctccattcagtctattaattgttgccgggaagctagagtaagtagttcgccagttaatagtttgcgcaacgttgttggcattgctacaggcatcgtggtgtcactctcgtcgtttggtatggcttcattcagctccggttcccaacgatcaaggcgagttacatgatcccccatgttgtgcaaaaaagcggttagctccttcggtcctccgatcgttgtcagaagtaagttggccgcagtgttatcactcatggttatggcagcactgcataattctcttactgtcatgccatccgtaagatgcttttctgtgactggtgagtactcaaccaagtcattctgagaatagtgtatgcggcgaccgagttgctcttgcccggcgtcaatacgggataatagtgtatcacatagcagaactttaaaagtgctcatcattggaaaacgttcttcggggcgaaaactctcaaggatcttaccgctgttgagatccagttcgatgtaacccactcgtgcacccaactgatcttcagcatcttttactttcaccagcgtttctgggtgagcaaaaacaggaaggcaaaatgccgcaaaaaagggaataagggcgacacggaaatgttgaatactcatactcttcctttttcaatgggtaataactgatataattaaattgaagctctaatttgtgagtttagtatacatgcatttacttataatacagttttttagttttgctggccgcatcttctcaaatatgcttcccagcctgcttttctgtaacgttcaccctctaccttagcatcccttccctttgcaaatagtcctcttccaacaataataatgtcagatcctgtagagaccacatcatccacggttctatactgttgacccaatgcgtctcccttgtcatctaaacccacaccgggtgtcataatcaaccaatcgtaaccttcatctcttccacccatgtctctttgagcaataaagccgataacaaaatctttgtcgctcttcgcaatgtcaacagtacccttagtatattctccagtagatagggagcccttgcatgacaattctgctaacatcaaaaggcctctaggttcctttgttacttcttctgccgcctgcttcaaaccgctaacaatacctgggcccaccacaccgtgtgcattcgtaatgtctgcccattctgctattctgtatacacccgcagagtactgcaatttgactgtattaccaatgtcagcaaattttctgtcttcg

SEQ ID NO: 42 - DNA, 7266 bp, Artificial Sequence
  OXC154-L21G/T49R/S60T/S88A(=GCT)
aagagtaaaaaattgtacttggcggataatgcctttagcggcttaactgtgccctccatggaaaaatcagtcaagatatccacatgtgtttttagtaaacaaattttgggacctaatgcttcaactaactccagtaattccttggtggtacgaacatccaatgaagcacacaagtttgtttgcttttcgtgcatgatattaaatagcttggcagcaacaggactaggatgagtagcagcacgttccttatatgtagctttcgacatgatttatcttcgtttcctgcaggtttttgttctgtgcagttgggttaagaatactgggcaatttcatgtttcttcaacactacatatgcgtatatataccaatctaagtctgtgctccttccttcgttcttccttctgttcggagattaccgaatcaaaaaaatttcaaagaaaccgaaatcaaaaaaaagaataaaaaaaaaatgatgaattgaattgaaaagctagcttatcgatgataagctgtcaaagatgagaattaattccacggactatagactatactagatactccgtctactgtacgatacacttccgctcaggtccttgtcctttaacgaggccttaccactcttttgttactctattgatccagctcagcaaaggcagtgtgatctaagattctatcttcgcgatgtagtaaaactagctagaccgagaaagagactagaaatgcaaaaggcacttctacaatggctgccatcattattatccgatgtgacgctgcagcttctcaatgatattcgaatacgctttgaggagatacagcctaatatccgacaaactgttttacagatttacgatcgtacttgttacccatcattgaattttgaacatccgaacctgggagttttccctgaaacagatagtatatttgaacctgtataataatatatagtctagcgctttacggaagacaatgtatgtatttcggttcctggagaaactattgcatctattgcataggtaatcttgcacgtcgcatccccggttcattttctgcgtttccatcttgcacttcaatagcatatctttgttcgcttgcctgtaacttacacgcgcctcgtatcttttaatgatggaataatttgggaatttactctgtgtttatttatttttatgttttgtatttggattttagaaagtaaataaagaaggtagaagagttacggaatgaagaaaaaaaaataaacaaaggtttaaaaaatttcaacaaaaagcgtactttacatatatatttattagacaagaaaagcagattaaatagatatacattcgattaacgataagtaaaatgtaaaatcacaggattttcgtgtgtggtcttctacacagacaagatgaaacaattcggcattaatacctgagagcaggaagagcaagataaaaggtagtatttgttggcgatccccctagagtcttttacatcttcggaaaacaaaaactattttttctttaatttctttttttactttctatttttaatttatatatttatattaaaaaatttaaattataattatttttatagcacgtgatgaaaaggaccgggaagctccaccccggttgataatcagaaaagccccaaaaacaggaagattgtataagcaaatatttaaattgtaaacgttaatattttgttaaaattcgcgttaaatttttgttaaatcagctcattttttaacgaatagcccgaaatcggcaaaatcccttataaatcaaaagaatagaccgagatagggttgagtgttgttccagtttccaacaagagtccactattaaagaacgtggactccaacgtcaaagggcgaaaaagggtctatcagggcgatggcccactacgtgaaccatcaccctaatcaagttttttggggtcgaggtgccgtaaagcagtaaatcggaagggtaaacggatgcccccatttagagcttgacggggaaagccggcgaacgtggcgagaaaggaagggaagaaagcgaaaggagcgggggctagggcggtgggaagtgtaggggtcacgctgggcgtaaccaccacacccgccgcgcttaatggggcgctacagggcgcgtggggatgatccactagtacggattagaagccgccgagcgggtgacagccctccgaaggaagactctcctccgtgcgtcctcgtcttcaccggtcgcgttcctgaaacgcagatgtgcctcgcgccgcactgctccgaacaataaagattctacaatactagcttttatggttatgaagaggaaaaattggcagtaacctggccccacaaaccttcaaatgaacgaatcaaattaacaaccataggatgataatgcgattagttttttagccttatttctggggtaattaatcagcgaagcgatgatttttgatctattaacagatatataaatgcaaaaactgcataaccactttaactaatactttcaacattttcggtttgtattacttcttattcaaatgtaataaaagtatcaacaaaaaattgttaatatacctctatactttaacgtcaaggagaaaaaaccccggatcggactactagcagctgtaatacgactcactatagggaatattaagcttaaacaatgaggcaggtttggttctcttggattgtgggattgttcctatgttttttcaacgtgtcttctgctgctccagtcaacactacaacagaagatgaaacggcacaaattccggctgaagctgtcatcggttactcagatttagaaggggatttcgatgttgctgttttgccattttccaacagcacaaataacgggttattgtttataaatactactattgccagcattgctgctaaagaagaaggggtatctctcgagaaaagagaggctgaagctatgccaagagaaaacttcttgaagtgcttctcccaatatatcccaaacaacgctactaacgggaagttagtttacactcaaaacaatccattatacatgtctgtcttaaactctactattcataacttaagatttacttccgatcggacccctaagccattggttatcgtcaccccaacgcacgtctcccatatccaaggtactatcttatgttctaagaaggttggtttgcaaatccgtactagatctggtggtcacgacgctgaaggtatgtcctatatctctcaagtcccatttgtcattgttgacttaagaaatatgagatccattaaaattgatgttcattctcaaactgcttgggtcgaagctggtgccaccttgggtgaagtttactactgggtcaacgaaaaaaacgaaaacttatctttagctgccggttactgtccaaccgtctgtgctggtggtcatttcggtggtggtggttacggtccattgatgcgtaactacggtttagctgctgacaacattattgacgctcatttagttaatgttcacggtaaggttttggacagaaaatctatgggtgaagatttattttgggccttgagaggtggtggtgctgaatccttcggtatcatcgttgcctggaagattcgtttagttgctgtcccttctaagtccaccatgttctccgtcaagaaaatcatggaaattcatgagttggtcaaattggttaacaagtggcaaaacatcgcttacaagtatgacaaggatttgttgttaatgactcacttcatcacccgtaatatcaccgacaaccaaggtaagaacaaaactgctattcacacctacttctcctccgtttttttgggtggtgtcgactccttagtcgatttgatgaacaaatcctttccagaattgggtattaagaaaactgattgtagacaattgtcttggattgacaccattatcttctattctggtgtcgttaactacgacaccgacaactttaacaaggaaattttgttggatcgttctgctggtcaaaatggtgccttcaaaatcaaattggactacgtcaaaaagccaatcccagaatctgttttcgttcaaattttggaaaagttgtacgaagaagacattggtgccggtatgtatgctttgtatccatatggtggtatcatggacgaaatttccgaatctgccatcccattcccacacagagctggtattttatatgaattgtggtacatctgttcttgggaaaagcaagaagacaacgaaaagcatttaaactggattagaaacatttacaacttcatgaccccatacgtttctaagaacccaagattagcctatttgaactaccgtgacttagatattggtattaatgacccaaagaacccaaacaactatactcaagccagaatttggggtgaaaagtacttcggtaagaacttcgatagattagttaaggttaaaactttggtcgatccaaacaacttcttcagaaacgaacaatccatcccaccattgccaagacatcgtcacggccatcatcaccatcaccattagctcgagcatgcatctagagggccgcatcatgtaattagttatgtcacgcttacattcacgccctccccccacatccgctctaaccgaaaaggaaggagttagacaacctgaagtctaggtccctatttatttttttatagttatgttagtattaagaacgttatttatatttcaaatttttcttttttttctgtacagacgcgtgtacgcatgtaacattatactgaaaaccttgcttgagaaggttttgggacgctcgaaggctttaatttgcggccctgcattaatgaatcggccaacgcgcggggagaggcggtttgcgtattgggcgctcttccgcttcctcgctcactgactcgctgcgctcggtcgttcggctgcggcgagcggtatcagctcactcaaaggcggtaatacggttatccacagaatcaggggataacgcaggaaagaacatgtgagcaaaaggccagcaaaagcccaggaaccgtaaaaaggccgcgttgctggcgtttttccataggctccgcccccctgacgagcatcacaaaaatcgacgctcaagtcagaggtggcgaaacccgacaggactataaagataccaggcgtttccccctggaagctccctcgtgcgctctcctgttccgaccctgccgcttaccggatacctgtccgcctttctcccttcgggaagcgtggcgctttctcatagctcacgctgtaggtatctcagttcggtgtaggtcgttcgctccaagctgggctgtgtgcacgaaccccccgttcagcccgaccgctgcgccttatccggtaactatcgtcttgagtccaacccggtaagacacgacttatcgccactggcagcagccactggtaacaggattagcagagcgaggtatgtaggcggtgctacagagttcttgaagtggtggcctaactacggctacactagaagaacagtatttggtatctgcgctctgctgaagccagttaccttcggaaaaagagttggtagctcttgatccggcaaacaaaccaccgctggtagcggtggtttttttgtttgcaagcagcagattacgcgcagaaaaaaaggatctcaagaagatcctttgatcttttctacggggtctgacgctcagtggaacgaaaactcacgttaagggattttggtcatgagattatcaaaaaggatcttcacctagatccttttaaattaaaaatgaagttttaaatcaatctaaagtatatatgagtaaacttggtctgacagttaccaatgcttaatcagtgaggcacctatctcagcgatctgtctatttcgttcatccatagttgcctgactccccgtcgtgtagataactacgatacgggagcgcttaccatctggccccagtgctgcaatgataccgcgagacccacgctcaccggctccagatttatcagcaataaaccagccagccggaagggccgagcgcagaagtggtcctgcaactttatccgcctccattcagtctattaattgttgccgggaagctagagtaagtagttcgccagttaatagtttgcgcaacgttgttggcattgctacaggcatcgtggtgtcactctcgtcgtttggtatggcttcattcagctccggttcccaacgatcaaggcgagttacatgatcccccatgttgtgcaaaaaagcggttagctccttcggtcctccgatcgttgtcagaagtaagttggccgcagtgttatcactcatggttatggcagcactgcataattctcttactgtcatgccatccgtaagatgcttttctgtgactggtgagtactcaaccaagtcattctgagaatagtgtatgcggcgaccgagttgctcttgcccggcgtcaatacgggataatagtgtatcacatagcagaactttaaaagtgctcatcattggaaaacgttcttcggggcgaaaactctcaaggatcttaccgctgttgagatccagttcgatgtaacccactcgtgcacccaactgatcttcagcatcttttactttcaccagcgtttctgggtgagcaaaaacaggaaggcaaaatgccgcaaaaaagggaataagggcgacacggaaatgttgaatactcatactcttcctttttcaatgggtaataactgatataattaaattgaagctctaatttgtgagtttagtatacatgcatttacttataatacagttttttagttttgctggccgcatcttctcaaatatgcttcccagcctgcttttctgtaacgttcaccctctaccttagcatcccttccctttgcaaatagtcctcttccaacaataataatgtcagatcctgtagagaccacatcatccacggttctatactgttgacccaatgcgtctcccttgtcatctaaacccacaccgggtgtcataatcaaccaatcgtaaccttcatctcttccacccatgtctctttgagcaataaagccgataacaaaatctttgtcgctcttcgcaatgtcaacagtacccttagtatattctccagtagatagggagcccttgcatgacaattctgctaacatcaaaaggcctctaggttcctttgttacttcttctgccgcctgcttcaaaccgctaacaatacctgggcccaccacaccgtgtgcattcgtaatgtctgcccattctgctattctgtatacacccgcagagtactgcaatttgactgtattaccaatgtcagcaaattttctgtcttcg

SEQ ID NO: 43 - DNA, 7266 bp, Artificial Sequence
  OXC154-A347G/A383V
aagagtaaaaaattgtacttggcggataatgcctttagcggcttaactgtgccctccatggaaaaatcagtcaagatatccacatgtgtttttagtaaacaaattttgggacctaatgcttcaactaactccagtaattccttggtggtacgaacatccaatgaagcacacaagtttgtttgcttttcgtgcatgatattaaatagcttggcagcaacaggactaggatgagtagcagcacgttccttatatgtagctttcgacatgatttatcttcgtttcctgcaggtttttgttctgtgcagttgggttaagaatactgggcaatttcatgtttcttcaacactacatatgcgtatatataccaatctaagtctgtgctccttccttcgttcttccttctgttcggagattaccgaatcaaaaaaatttcaaagaaaccgaaatcaaaaaaaagaataaaaaaaaaatgatgaattgaattgaaaagctagcttatcgatgataagctgtcaaagatgagaattaattccacggactatagactatactagatactccgtctactgtacgatacacttccgctcaggtccttgtcctttaacgaggccttaccactcttttgttactctattgatccagctcagcaaaggcagtgtgatctaagattctatcttcgcgatgtagtaaaactagctagaccgagaaagagactagaaatgcaaaaggcacttctacaatggctgccatcattattatccgatgtgacgctgcagcttctcaatgatattcgaatacgctttgaggagatacagcctaatatccgacaaactgttttacagatttacgatcgtacttgttacccatcattgaattttgaacatccgaacctgggagttttccctgaaacagatagtatatttgaacctgtataataatatatagtctagcgctttacggaagacaatgtatgtatttcggttcctggagaaactattgcatctattgcataggtaatcttgcacgtcgcatccccggttcattttctgcgtttccatcttgcacttcaatagcatatctttgttcgcttgcctgtaacttacacgcgcctcgtatcttttaatgatggaataatttgggaatttactctgtgtttatttatttttatgttttgtatttggattttagaaagtaaataaagaaggtagaagagttacggaatgaagaaaaaaaaataaacaaaggtttaaaaaatttcaacaaaaagcgtactttacatatatatttattagacaagaaaagcagattaaatagatatacattcgattaacgataagtaaaatgtaaaatcacaggattttcgtgtgtggtcttctacacagacaagatgaaacaattcggcattaatacctgagagcaggaagagcaagataaaaggtagtatttgttggcgatccccctagagtcttttacatcttcggaaaacaaaaactattttttctttaatttctttttttactttctatttttaatttatatatttatattaaaaaatttaaattataattatttttatagcacgtgatgaaaaggaccgggaagctccaccccggttgataatcagaaaagccccaaaaacaggaagattgtataagcaaatatttaaattgtaaacgttaatattttgttaaaattcgcgttaaatttttgttaaatcagctcattttttaacgaatagcccgaaatcggcaaaatcccttataaatcaaaagaatagaccgagatagggttgagtgttgttccagtttccaacaagagtccactattaaagaacgtggactccaacgtcaaagggcgaaaaagggtctatcagggcgatggcccactacgtgaaccatcaccctaatcaagttttttggggtcgaggtgccgtaaagcagtaaatcggaagggtaaacggatgcccccatttagagcttgacggggaaagccggcgaacgtggcgagaaaggaagggaagaaagcgaaaggagcgggggctagggcggtgggaagtgtaggggtcacgctgggcgtaaccaccacacccgccgcgcttaatggggcgctacagggcgcgtggggatgatccactagtacggattagaagccgccgagcgggtgacagccctccgaaggaagactctcctccgtgcgtcctcgtcttcaccggtcgcgttcctgaaacgcagatgtgcctcgcgccgcactgctccgaacaataaagattctacaatactagcttttatggttatgaagaggaaaaattggcagtaacctggccccacaaaccttcaaatgaacgaatcaaattaacaaccataggatgataatgcgattagttttttagccttatttctggggtaattaatcagcgaagcgatgatttttgatctattaacagatatataaatgcaaaaactgcataaccactttaactaatactttcaacattttcggtttgtattacttcttattcaaatgtaataaaagtatcaacaaaaaattgttaatatacctctatactttaacgtcaaggagaaaaaaccccggatcggactactagcagctgtaatacgactcactatagggaatattaagcttaaacaatgaggcaggtttggttctcttggattgtgggattgttcctatgttttttcaacgtgtcttctgctgctccagtcaacactacaacagaagatgaaacggcacaaattccggctgaagctgtcatcggttactcagatttagaaggggatttcgatgttgctgttttgccattttccaacagcacaaataacgggttattgtttataaatactactattgccagcattgctgctaaagaagaaggggtatctctcgagaaaagagaggctgaagctatgccaagagaaaacttcttgaagtgcttctcccaatatatcccaaacaacgctactaacttaaagttagtttacactcaaaacaatccattatacatgtctgtcttaaactctactattcataacttaagatttacttccgatactacccctaagccattggttatcgtcaccccatctcacgtctcccatatccaaggtactatcttatgttctaagaaggttggtttgcaaatccgtactagatctggtggtcacgactctgaaggtatgtcctatatctctcaagtcccatttgtcattgttgacttaagaaatatgagatccattaaaattgatgttcattctcaaactgcttgggtcgaagctggtgccaccttgggtgaagtttactactgggtcaacgaaaaaaacgaaaacttatctttagctgccggttactgtccaaccgtctgtgctggtggtcatttcggtggtggtggttacggtccattgatgcgtaactacggtttagctgctgacaacattattgacgctcatttagttaatgttcacggtaaggttttggacagaaaatctatgggtgaagatttattttgggccttgagaggtggtggtgctgaatccttcggtatcatcgttgcctggaagattcgtttagttgctgtcccttctaagtccaccatgttctccgtcaagaaaatcatggaaattcatgagttggtcaaattggttaacaagtggcaaaacatcgcttacaagtatgacaaggatttgttgttaatgactcacttcatcacccgtaatatcaccgacaaccaaggtaagaacaaaactgctattcacacctacttctcctccgtttttttgggtggtgtcgactccttagtcgatttgatgaacaaatcctttccagaattgggtattaagaaaactgattgtagacaattgtcttggattgacaccattatcttctattctggtgtcgttaactacgacaccgacaactttaacaaggaaattttgttggatcgttctgggggtcaaaatggtgccttcaaaatcaaattggactacgtcaaaaagccaatcccagaatctgttttcgttcaaattttggaaaagttgtacgaagaagacattggtgtgggtatgtatgctttgtatccatatggtggtatcatggacgaaatttccgaatctgccatcccattcccacacagagctggtattttatatgaattgtggtacatctgttcttgggaaaagcaagaagacaacgaaaagcatttaaactggattagaaacatttacaacttcatgaccccatacgtttctaagaacccaagattagcctatttgaactaccgtgacttagatattggtattaatgacccaaagaacccaaacaactatactcaagccagaatttggggtgaaaagtacttcggtaagaacttcgatagattagttaaggttaaaactttggtcgatccaaacaacttcttcagaaacgaacaatccatcccaccattgccaagacatcgtcacggccatcatcaccatcaccattagctcgagcatgcatctagagggccgcatcatgtaattagttatgtcacgcttacattcacgccctccccccacatccgctctaaccgaaaaggaaggagttagacaacctgaagtctaggtccctatttatttttttatagttatgttagtattaagaacgttatttatatttcaaatttttcttttttttctgtacagacgcgtgtacgcatgtaacattatactgaaaaccttgcttgagaaggttttgggacgctcgaaggctttaatttgcggccctgcattaatgaatcggccaacgcgcggggagaggcggtttgcgtattgggcgctcttccgcttcctcgctcactgactcgctgcgctcggtcgttcggctgcggcgagcggtatcagctcactcaaaggcggtaatacggttatccacagaatcaggggataacgcaggaaagaacatgtgagcaaaaggccagcaaaagcccaggaaccgtaaaaaggccgcgttgctggcgtttttccataggctccgcccccctgacgagcatcacaaaaatcgacgctcaagtcagaggtggcgaaacccgacaggactataaagataccaggcgtttccccctggaagctccctcgtgcgctctcctgttccgaccctgccgcttaccggatacctgtccgcctttctcccttcgggaagcgtggcgctttctcatagctcacgctgtaggtatctcagttcggtgtaggtcgttcgctccaagctgggctgtgtgcacgaaccccccgttcagcccgaccgctgcgccttatccggtaactatcgtcttgagtccaacccggtaagacacgacttatcgccactggcagcagccactggtaacaggattagcagagcgaggtatgtaggcggtgctacagagttcttgaagtggtggcctaactacggctacactagaagaacagtatttggtatctgcgctctgctgaagccagttaccttcggaaaaagagttggtagctcttgatccggcaaacaaaccaccgctggtagcggtggtttttttgtttgcaagcagcagattacgcgcagaaaaaaaggatctcaagaagatcctttgatcttttctacggggtctgacgctcagtggaacgaaaactcacgttaagggattttggtcatgagattatcaaaaaggatcttcacctagatccttttaaattaaaaatgaagttttaaatcaatctaaagtatatatgagtaaacttggtctgacagttaccaatgcttaatcagtgaggcacctatctcagcgatctgtctatttcgttcatccatagttgcctgactccccgtcgtgtagataactacgatacgggagcgcttaccatctggccccagtgctgcaatgataccgcgagacccacgctcaccggctccagatttatcagcaataaaccagccagccggaagggccgagcgcagaagtggtcctgcaactttatccgcctccattcagtctattaattgttgccgggaagctagagtaagtagttcgccagttaatagtttgcgcaacgttgttggcattgctacaggcatcgtggtgtcactctcgtcgtttggtatggcttcattcagctccggttcccaacgatcaaggcgagttacatgatcccccatgttgtgcaaaaaagcggttagctccttcggtcctccgatcgttgtcagaagtaagttggccgcagtgttatcactcatggttatggcagcactgcataattctcttactgtcatgccatccgtaagatgcttttctgtgactggtgagtactcaaccaagtcattctgagaatagtgtatgcggcgaccgagttgctcttgcccggcgtcaatacgggataatagtgtatcacatagcagaactttaaaagtgctcatcattggaaaacgttcttcggggcgaaaactctcaaggatcttaccgctgttgagatccagttcgatgtaacccactcgtgcacccaactgatcttcagcatcttttactttcaccagcgtttctgggtgagcaaaaacaggaaggcaaaatgccgcaaaaaagggaataagggcgacacggaaatgttgaatactcatactcttcctttttcaatgggtaataactgatataattaaattgaagctctaatttgtgagtttagtatacatgcatttacttataatacagttttttagttttgctggccgcatcttctcaaatatgcttcccagcctgcttttctgtaacgttcaccctctaccttagcatcccttccctttgcaaatagtcctcttccaacaataataatgtcagatcctgtagagaccacatcatccacggttctatactgttgacccaatgcgtctcccttgtcatctaaacccacaccgggtgtcataatcaaccaatcgtaaccttcatctcttccacccatgtctctttgagcaataaagccgataacaaaatctttgtcgctcttcgcaatgtcaacagtacccttagtatattctccagtagatagggagcccttgcatgacaattctgctaacatcaaaaggcctctaggttcctttgttacttcttctgccgcctgcttcaaaccgctaacaatacctgggcccaccacaccgtgtgcattcgtaatgtctgcccattctgctattctgtatacacccgcagagtactgcaatttgactgtattaccaatgtcagcaaattttctgtcttcg

SEQ ID NO: 44 - DNA, 7266 bp, Artificial Sequence
  OXC154-R3W/L21G/T49R/S60T/S88A(=GCT)
aagagtaaaaaattgtacttggcggataatgcctttagcggcttaactgtgccctccatggaaaaatcagtcaagatatccacatgtgtttttagtaaacaaattttgggacctaatgcttcaactaactccagtaattccttggtggtacgaacatccaatgaagcacacaagtttgtttgcttttcgtgcatgatattaaatagcttggcagcaacaggactaggatgagtagcagcacgttccttatatgtagctttcgacatgatttatcttcgtttcctgcaggtttttgttctgtgcagttgggttaagaatactgggcaatttcatgtttcttcaacactacatatgcgtatatataccaatctaagtctgtgctccttccttcgttcttccttctgttcggagattaccgaatcaaaaaaatttcaaagaaaccgaaatcaaaaaaaagaataaaaaaaaaatgatgaattgaattgaaaagctagcttatcgatgataagctgtcaaagatgagaattaattccacggactatagactatactagatactccgtctactgtacgatacacttccgctcaggtccttgtcctttaacgaggccttaccactcttttgttactctattgatccagctcagcaaaggcagtgtgatctaagattctatcttcgcgatgtagtaaaactagctagaccgagaaagagactagaaatgcaaaaggcacttctacaatggctgccatcattattatccgatgtgacgctgcagcttctcaatgatattcgaatacgctttgaggagatacagcctaatatccgacaaactgttttacagatttacgatcgtacttgttacccatcattgaattttgaacatccgaacctgggagttttccctgaaacagatagtatatttgaacctgtataataatatatagtctagcgctttacggaagacaatgtatgtatttcggttcctggagaaactattgcatctattgcataggtaatcttgcacgtcgcatccccggttcattttctgcgtttccatcttgcacttcaatagcatatctttgttcgcttgcctgtaacttacacgcgcctcgtatcttttaatgatggaataatttgggaatttactctgtgtttatttatttttatgttttgtatttggattttagaaagtaaataaagaaggtagaagagttacggaatgaagaaaaaaaaataaacaaaggtttaaaaaatttcaacaaaaagcgtactttacatatatatttattagacaagaaaagcagattaaatagatatacattcgattaacgataagtaaaatgtaaaatcacaggattttcgtgtgtggtcttctacacagacaagatgaaacaattcggcattaatacctgagagcaggaagagcaagataaaaggtagtatttgttggcgatccccctagagtcttttacatcttcggaaaacaaaaactattttttctttaatttctttttttactttctatttttaatttatatatttatattaaaaaatttaaattataattatttttatagcacgtgatgaaaaggaccgggaagctccaccccggttgataatcagaaaagccccaaaaacaggaagattgtataagcaaatatttaaattgtaaacgttaatattttgttaaaattcgcgttaaatttttgttaaatcagctcattttttaacgaatagcccgaaatcggcaaaatcccttataaatcaaaagaatagaccgagatagggttgagtgttgttccagtttccaacaagagtccactattaaagaacgtggactccaacgtcaaagggcgaaaaagggtctatcagggcgatggcccactacgtgaaccatcaccctaatcaagttttttggggtcgaggtgccgtaaagcagtaaatcggaagggtaaacggatgcccccatttagagcttgacggggaaagccggcgaacgtggcgagaaaggaagggaagaaagcgaaaggagcgggggctagggcggtgggaagtgtaggggtcacgctgggcgtaaccaccacacccgccgcgcttaatggggcgctacagggcgcgtggggatgatccactagtacggattagaagccgccgagcgggtgacagccctccgaaggaagactctcctccgtgcgtcctcgtcttcaccggtcgcgttcctgaaacgcagatgtgcctcgcgccgcactgctccgaacaataaagattctacaatactagcttttatggttatgaagaggaaaaattggcagtaacctggccccacaaaccttcaaatgaacgaatcaaattaacaaccataggatgataatgcgattagttttttagccttatttctggggtaattaatcagcgaagcgatgatttttgatctattaacagatatataaatgcaaaaactgcataaccactttaactaatactttcaacattttcggtttgtattacttcttattcaaatgtaataaaagtatcaacaaaaaattgttaatatacctctatactttaacgtcaaggagaaaaaaccccggatcggactactagcagctgtaatacgactcactatagggaatattaagcttaaacaatgaggcaggtttggttctcttggattgtgggattgttcctatgttttttcaacgtgtcttctgctgctccagtcaacactacaacagaagatgaaacggcacaaattccggctgaagctgtcatcggttactcagatttagaaggggatttcgatgttgctgttttgccattttccaacagcacaaataacgggttattgtttataaatactactattgccagcattgctgctaaagaagaaggggtatctctcgagaaaagagaggctgaagctatgccatgggaaaacttcttgaagtgcttctcccaatatatcccaaacaacgctactaacgggaagttagtttacactcaaaacaatccattatacatgtctgtcttaaactctactattcataacttaagatttacttccgatcggacccctaagccattggttatcgtcaccccaacgcacgtctcccatatccaaggtactatcttatgttctaagaaggttggtttgcaaatccgtactagatctggtggtcacgacgctgaaggtatgtcctatatctctcaagtcccatttgtcattgttgacttaagaaatatgagatccattaaaattgatgttcattctcaaactgcttgggtcgaagctggtgccaccttgggtgaagtttactactgggtcaacgaaaaaaacgaaaacttatctttagctgccggttactgtccaaccgtctgtgctggtggtcatttcggtggtggtggttacggtccattgatgcgtaactacggtttagctgctgacaacattattgacgctcatttagttaatgttcacggtaaggttttggacagaaaatctatgggtgaagatttattttgggccttgagaggtggtggtgctgaatccttcggtatcatcgttgcctggaagattcgtttagttgctgtcccttctaagtccaccatgttctccgtcaagaaaatcatggaaattcatgagttggtcaaattggttaacaagtggcaaaacatcgcttacaagtatgacaaggatttgttgttaatgactcacttcatcacccgtaatatcaccgacaaccaaggtaagaacaaaactgctattcacacctacttctcctccgtttttttgggtggtgtcgactccttagtcgatttgatgaacaaatcctttccagaattgggtattaagaaaactgattgtagacaattgtcttggattgacaccattatcttctattctggtgtcgttaactacgacaccgacaactttaacaaggaaattttgttggatcgttctgctggtcaaaatggtgccttcaaaatcaaattggactacgtcaaaaagccaatcccagaatctgttttcgttcaaattttggaaaagttgtacgaagaagacattggtgccggtatgtatgctttgtatccatatggtggtatcatggacgaaatttccgaatctgccatcccattcccacacagagctggtattttatatgaattgtggtacatctgttcttgggaaaagcaagaagacaacgaaaagcatttaaactggattagaaacatttacaacttcatgaccccatacgtttctaagaacccaagattagcctatttgaactaccgtgacttagatattggtattaatgacccaaagaacccaaacaactatactcaagccagaatttggggtgaaaagtacttcggtaagaacttcgatagattagttaaggttaaaactttggtcgatccaaacaacttcttcagaaacgaacaatccatcccaccattgccaagacatcgtcacggccatcatcaccatcaccattagctcgagcatgcatctagagggccgcatcatgtaattagttatgtcacgcttacattcacgccctccccccacatccgctctaaccgaaaaggaaggagttagacaacctgaagtctaggtccctatttatttttttatagttatgttagtattaagaacgttatttatatttcaaatttttcttttttttctgtacagacgcgtgtacgcatgtaacattatactgaaaaccttgcttgagaaggttttgggacgctcgaaggctttaatttgcggccctgcattaatgaatcggccaacgcgcggggagaggcggtttgcgtattgggcgctcttccgcttcctcgctcactgactcgctgcgctcggtcgttcggctgcggcgagcggtatcagctcactcaaaggcggtaatacggttatccacagaatcaggggataacgcaggaaagaacatgtgagcaaaaggccagcaaaagcccaggaaccgtaaaaaggccgcgttgctggcgtttttccataggctccgcccccctgacgagcatcacaaaaatcgacgctcaagtcagaggtggcgaaacccgacaggactataaagataccaggcgtttccccctggaagctccctcgtgcgctctcctgttccgaccctgccgcttaccggatacctgtccgcctttctcccttcgggaagcgtggcgctttctcatagctcacgctgtaggtatctcagttcggtgtaggtcgttcgctccaagctgggctgtgtgcacgaaccccccgttcagcccgaccgctgcgccttatccggtaactatcgtcttgagtccaacccggtaagacacgacttatcgccactggcagcagccactggtaacaggattagcagagcgaggtatgtaggcggtgctacagagttcttgaagtggtggcctaactacggctacactagaagaacagtatttggtatctgcgctctgctgaagccagttaccttcggaaaaagagttggtagctcttgatccggcaaacaaaccaccgctggtagcggtggtttttttgtttgcaagcagcagattacgcgcagaaaaaaaggatctcaagaagatcctttgatcttttctacggggtctgacgctcagtggaacgaaaactcacgttaagggattttggtcatgagattatcaaaaaggatcttcacctagatccttttaaattaaaaatgaagttttaaatcaatctaaagtatatatgagtaaacttggtctgacagttaccaatgcttaatcagtgaggcacctatctcagcgatctgtctatttcgttcatccatagttgcctgactccccgtcgtgtagataactacgatacgggagcgcttaccatctggccccagtgctgcaatgataccgcgagacccacgctcaccggctccagatttatcagcaataaaccagccagccggaagggccgagcgcagaagtggtcctgcaactttatccgcctccattcagtctattaattgttgccgggaagctagagtaagtagttcgccagttaatagtttgcgcaacgttgttggcattgctacaggcatcgtggtgtcactctcgtcgtttggtatggcttcattcagctccggttcccaacgatcaaggcgagttacatgatcccccatgttgtgcaaaaaagcggttagctccttcggtcctccgatcgttgtcagaagtaagttggccgcagtgttatcactcatggttatggcagcactgcataattctcttactgtcatgccatccgtaagatgcttttctgtgactggtgagtactcaaccaagtcattctgagaatagtgtatgcggcgaccgagttgctcttgcccggcgtcaatacgggataatagtgtatcacatagcagaactttaaaagtgctcatcattggaaaacgttcttcggggcgaaaactctcaaggatcttaccgctgttgagatccagttcgatgtaacccactcgtgcacccaactgatcttcagcatcttttactttcaccagcgtttctgggtgagcaaaaacaggaaggcaaaatgccgcaaaaaagggaataagggcgacacggaaatgttgaatactcatactcttcctttttcaatgggtaataactgatataattaaattgaagctctaatttgtgagtttagtatacatgcatttacttataatacagttttttagttttgctggccgcatcttctcaaatatgcttcccagcctgcttttctgtaacgttcaccctctaccttagcatcccttccctttgcaaatagtcctcttccaacaataataatgtcagatcctgtagagaccacatcatccacggttctatactgttgacccaatgcgtctcccttgtcatctaaacccacaccgggtgtcataatcaaccaatcgtaaccttcatctcttccacccatgtctctttgagcaataaagccgataacaaaatctttgtcgctcttcgcaatgtcaacagtacccttagtatattctccagtagatagggagcccttgcatgacaattctgctaacatcaaaaggcctctaggttcctttgttacttcttctgccgcctgcttcaaaccgctaacaatacctgggcccaccacaccgtgtgcattcgtaatgtctgcccattctgctattctgtatacacccgcagagtactgcaatttgactgtattaccaatgtcagcaaattttctgtcttcg

SEQ ID NO: 45 - DNA, 7266 bp, Artificial Sequence
  OXC154-A18E/S88A(=GCC)
aagagtaaaaaattgtacttggcggataatgcctttagcggcttaactgtgccctccatggaaaaatcagtcaagatatccacatgtgtttttagtaaacaaattttgggacctaatgcttcaactaactccagtaattccttggtggtacgaacatccaatgaagcacacaagtttgtttgcttttcgtgcatgatattaaatagcttggcagcaacaggactaggatgagtagcagcacgttccttatatgtagctttcgacatgatttatcttcgtttcctgcaggtttttgttctgtgcagttgggttaagaatactgggcaatttcatgtttcttcaacactacatatgcgtatatataccaatctaagtctgtgctccttccttcgttcttccttctgttcggagattaccgaatcaaaaaaatttcaaagaaaccgaaatcaaaaaaaagaataaaaaaaaaatgatgaattgaattgaaaagctagcttatcgatgataagctgtcaaagatgagaattaattccacggactatagactatactagatactccgtctactgtacgatacacttccgctcaggtccttgtcctttaacgaggccttaccactcttttgttactctattgatccagctcagcaaaggcagtgtgatctaagattctatcttcgcgatgtagtaaaactagctagaccgagaaagagactagaaatgcaaaaggcacttctacaatggctgccatcattattatccgatgtgacgctgcagcttctcaatgatattcgaatacgctttgaggagatacagcctaatatccgacaaactgttttacagatttacgatcgtacttgttacccatcattgaattttgaacatccgaacctgggagttttccctgaaacagatagtatatttgaacctgtataataatatatagtctagcgctttacggaagacaatgtatgtatttcggttcctggagaaactattgcatctattgcataggtaatcttgcacgtcgcatccccggttcattttctgcgtttccatcttgcacttcaatagcatatctttgttcgcttgcctgtaacttacacgcgcctcgtatcttttaatgatggaataatttgggaatttactctgtgtttatttatttttatgttttgtatttggattttagaaagtaaataaagaaggtagaagagttacggaatgaagaaaaaaaaataaacaaaggtttaaaaaatttcaacaaaaagcgtactttacatatatatttattagacaagaaaagcagattaaatagatatacattcgattaacgataagtaaaatgtaaaatcacaggattttcgtgtgtggtcttctacacagacaagatgaaacaattcggcattaatacctgagagcaggaagagcaagataaaaggtagtatttgttggcgatccccctagagtcttttacatcttcggaaaacaaaaactattttttctttaatttctttttttactttctatttttaatttatatatttatattaaaaaatttaaattataattatttttatagcacgtgatgaaaaggaccgggaagctccaccccggttgataatcagaaaagccccaaaaacaggaagattgtataagcaaatatttaaattgtaaacgttaatattttgttaaaattcgcgttaaatttttgttaaatcagctcattttttaacgaatagcccgaaatcggcaaaatcccttataaatcaaaagaatagaccgagatagggttgagtgttgttccagtttccaacaagagtccactattaaagaacgtggactccaacgtcaaagggcgaaaaagggtctatcagggcgatggcccactacgtgaaccatcaccctaatcaagttttttggggtcgaggtgccgtaaagcagtaaatcggaagggtaaacggatgcccccatttagagcttgacggggaaagccggcgaacgtggcgagaaaggaagggaagaaagcgaaaggagcgggggctagggcggtgggaagtgtaggggtcacgctgggcgtaaccaccacacccgccgcgcttaatggggcgctacagggcgcgtggggatgatccactagtacggattagaagccgccgagcgggtgacagccctccgaaggaagactctcctccgtgcgtcctcgtcttcaccggtcgcgttcctgaaacgcagatgtgcctcgcgccgcactgctccgaacaataaagattctacaatactagcttttatggttatgaagaggaaaaattggcagtaacctggccccacaaaccttcaaatgaacgaatcaaattaacaaccataggatgataatgcgattagttttttagccttatttctggggtaattaatcagcgaagcgatgatttttgatctattaacagatatataaatgcaaaaactgcataaccactttaactaatactttcaacattttcggtttgtattacttcttattcaaatgtaataaaagtatcaacaaaaaattgttaatatacctctatactttaacgtcaaggagaaaaaaccccggatcggactactagcagctgtaatacgactcactatagggaatattaagcttaaacaatgaggcaggtttggttctcttggattgtgggattgttcctatgttttttcaacgtgtcttctgctgctccagtcaacactacaacagaagatgaaacggcacaaattccggctgaagctgtcatcggttactcagatttagaaggggatttcgatgttgctgttttgccattttccaacagcacaaataacgggttattgtttataaatactactattgccagcattgctgctaaagaagaaggggtatctctcgagaaaagagaggctgaagctatgccaagagaaaacttcttgaagtgcttctcccaatatatcccaaacaacgagactaacttaaagttagtttacactcaaaacaatccattatacatgtctgtcttaaactctactattcataacttaagatttacttccgatactacccctaagccattggttatcgtcaccccatctcacgtctcccatatccaaggtactatcttatgttctaagaaggttggtttgcaaatccgtactagatctggtggtcacgacgccgaaggtatgtcctatatctctcaagtcccatttgtcattgttgacttaagaaatatgagatccattaaaattgatgttcattctcaaactgcttgggtcgaagctggtgccaccttgggtgaagtttactactgggtcaacgaaaaaaacgaaaacttatctttagctgccggttactgtccaaccgtctgtgctggtggtcatttcggtggtggtggttacggtccattgatgcgtaactacggtttagctgctgacaacattattgacgctcatttagttaatgttcacggtaaggttttggacagaaaatctatgggtgaagatttattttgggccttgagaggtggtggtgctgaatccttcggtatcatcgttgcctggaagattcgtttagttgctgtcccttctaagtccaccatgttctccgtcaagaaaatcatggaaattcatgagttggtcaaattggttaacaagtggcaaaacatcgcttacaagtatgacaaggatttgttgttaatgactcacttcatcacccgtaatatcaccgacaaccaaggtaagaacaaaactgctattcacacctacttctcctccgtttttttgggtggtgtcgactccttagtcgatttgatgaacaaatcctttccagaattgggtattaagaaaactgattgtagacaattgtcttggattgacaccattatcttctattctggtgtcgttaactacgacaccgacaactttaacaaggaaattttgttggatcgttctgctggtcaaaatggtgccttcaaaatcaaattggactacgtcaaaaagccaatcccagaatctgttttcgttcaaattttggaaaagttgtacgaagaagacattggtgccggtatgtatgctttgtatccatatggtggtatcatggacgaaatttccgaatctgccatcccattcccacacagagctggtattttatatgaattgtggtacatctgttcttgggaaaagcaagaagacaacgaaaagcatttaaactggattagaaacatttacaacttcatgaccccatacgtttctaagaacccaagattagcctatttgaactaccgtgacttagatattggtattaatgacccaaagaacccaaacaactatactcaagccagaatttggggtgaaaagtacttcggtaagaacttcgatagattagttaaggttaaaactttggtcgatccaaacaacttcttcagaaacgaacaatccatcccaccattgccaagacatcgtcacggccatcatcaccatcaccattagctcgagcatgcatctagagggccgcatcatgtaattagttatgtcacgcttacattcacgccctccccccacatccgctctaaccgaaaaggaaggagttagacaacctgaagtctaggtccctatttatttttttatagttatgttagtattaagaacgttatttatatttcaaatttttcttttttttctgtacagacgcgtgtacgcatgtaacattatactgaaaaccttgcttgagaaggttttgggacgctcgaaggctttaatttgcggccctgcattaatgaatcggccaacgcgcggggagaggcggtttgcgtattgggcgctcttccgcttcctcgctcactgactcgctgcgctcggtcgttcggctgcggcgagcggtatcagctcactcaaaggcggtaatacggttatccacagaatcaggggataacgcaggaaagaacatgtgagcaaaaggccagcaaaagcccaggaaccgtaaaaaggccgcgttgctggcgtttttccataggctccgcccccctgacgagcatcacaaaaatcgacgctcaagtcagaggtggcgaaacccgacaggactataaagataccaggcgtttccccctggaagctccctcgtgcgctctcctgttccgaccctgccgcttaccggatacctgtccgcctttctcccttcgggaagcgtggcgctttctcatagctcacgctgtaggtatctcagttcggtgtaggtcgttcgctccaagctgggctgtgtgcacgaaccccccgttcagcccgaccgctgcgccttatccggtaactatcgtcttgagtccaacccggtaagacacgacttatcgccactggcagcagccactggtaacaggattagcagagcgaggtatgtaggcggtgctacagagttcttgaagtggtggcctaactacggctacactagaagaacagtatttggtatctgcgctctgctgaagccagttaccttcggaaaaagagttggtagctcttgatccggcaaacaaaccaccgctggtagcggtggtttttttgtttgcaagcagcagattacgcgcagaaaaaaaggatctcaagaagatcctttgatcttttctacggggtctgacgctcagtggaacgaaaactcacgttaagggattttggtcatgagattatcaaaaaggatcttcacctagatccttttaaattaaaaatgaagttttaaatcaatctaaagtatatatgagtaaacttggtctgacagttaccaatgcttaatcagtgaggcacctatctcagcgatctgtctatttcgttcatccatagttgcctgactccccgtcgtgtagataactacgatacgggagcgcttaccatctggccccagtgctgcaatgataccgcgagacccacgctcaccggctccagatttatcagcaataaaccagccagccggaagggccgagcgcagaagtggtcctgcaactttatccgcctccattcagtctattaattgttgccgggaagctagagtaagtagttcgccagttaatagtttgcgcaacgttgttggcattgctacaggcatcgtggtgtcactctcgtcgtttggtatggcttcattcagctccggttcccaacgatcaaggcgagttacatgatcccccatgttgtgcaaaaaagcggttagctccttcggtcctccgatcgttgtcagaagtaagttggccgcagtgttatcactcatggttatggcagcactgcataattctcttactgtcatgccatccgtaagatgcttttctgtgactggtgagtactcaaccaagtcattctgagaatagtgtatgcggcgaccgagttgctcttgcccggcgtcaatacgggataatagtgtatcacatagcagaactttaaaagtgctcatcattggaaaacgttcttcggggcgaaaactctcaaggatcttaccgctgttgagatccagttcgatgtaacccactcgtgcacccaactgatcttcagcatcttttactttcaccagcgtttctgggtgagcaaaaacaggaaggcaaaatgccgcaaaaaagggaataagggcgacacggaaatgttgaatactcatactcttcctttttcaatgggtaataactgatataattaaattgaagctctaatttgtgagtttagtatacatgcatttacttataatacagttttttagttttgctggccgcatcttctcaaatatgcttcccagcctgcttttctgtaacgttcaccctctaccttagcatcccttccctttgcaaatagtcctcttccaacaataataatgtcagatcctgtagagaccacatcatccacggttctatactgttgacccaatgcgtctcccttgtcatctaaacccacaccgggtgtcataatcaaccaatcgtaaccttcatctcttccacccatgtctctttgagcaataaagccgataacaaaatctttgtcgctcttcgcaatgtcaacagtacccttagtatattctccagtagatagggagcccttgcatgacaattctgctaacatcaaaaggcctctaggttcctttgttacttcttctgccgcctgcttcaaaccgctaacaatacctgggcccaccacaccgtgtgcattcgtaatgtctgcccattctgctattctgtatacacccgcagagtactgcaatttgactgtattaccaatgtcagcaaattttctgtcttcg

SEQ ID NO: 46 - DNA, 7266 bp, Artificial Sequence
  OXC154-R3W/L21G/T49R
aagagtaaaaaattgtacttggcggataatgcctttagcggcttaactgtgccctccatggaaaaatcagtcaagatatccacatgtgtttttagtaaacaaattttgggacctaatgcttcaactaactccagtaattccttggtggtacgaacatccaatgaagcacacaagtttgtttgcttttcgtgcatgatattaaatagcttggcagcaacaggactaggatgagtagcagcacgttccttatatgtagctttcgacatgatttatcttcgtttcctgcaggtttttgttctgtgcagttgggttaagaatactgggcaatttcatgtttcttcaacactacatatgcgtatatataccaatctaagtctgtgctccttccttcgttcttccttctgttcggagattaccgaatcaaaaaaatttcaaagaaaccgaaatcaaaaaaaagaataaaaaaaaaatgatgaattgaattgaaaagctagcttatcgatgataagctgtcaaagatgagaattaattccacggactatagactatactagatactccgtctactgtacgatacacttccgctcaggtccttgtcctttaacgaggccttaccactcttttgttactctattgatccagctcagcaaaggcagtgtgatctaagattctatcttcgcgatgtagtaaaactagctagaccgagaaagagactagaaatgcaaaaggcacttctacaatggctgccatcattattatccgatgtgacgctgcagcttctcaatgatattcgaatacgctttgaggagatacagcctaatatccgacaaactgttttacagatttacgatcgtacttgttacccatcattgaattttgaacatccgaacctgggagttttccctgaaacagatagtatatttgaacctgtataataatatatagtctagcgctttacggaagacaatgtatgtatttcggttcctggagaaactattgcatctattgcataggtaatcttgcacgtcgcatccccggttcattttctgcgtttccatcttgcacttcaatagcatatctttgttcgcttgcctgtaacttacacgcgcctcgtatcttttaatgatggaataatttgggaatttactctgtgtttatttatttttatgttttgtatttggattttagaaagtaaataaagaaggtagaagagttacggaatgaagaaaaaaaaataaacaaaggtttaaaaaatttcaacaaaaagcgtactttacatatatatttattagacaagaaaagcagattaaatagatatacattcgattaacgataagtaaaatgtaaaatcacaggattttcgtgtgtggtcttctacacagacaagatgaaacaattcggcattaatacctgagagcaggaagagcaagataaaaggtagtatttgttggcgatccccctagagtcttttacatcttcggaaaacaaaaactattttttctttaatttctttttttactttctatttttaatttatatatttatattaaaaaatttaaattataattatttttatagcacgtgatgaaaaggaccgggaagctccaccccggttgataatcagaaaagccccaaaaacaggaagattgtataagcaaatatttaaattgtaaacgttaatattttgttaaaattcgcgttaaatttttgttaaatcagctcattttttaacgaatagcccgaaatcggcaaaatcccttataaatcaaaagaatagaccgagatagggttgagtgttgttccagtttccaacaagagtccactattaaagaacgtggactccaacgtcaaagggcgaaaaagggtctatcagggcgatggcccactacgtgaaccatcaccctaatcaagttttttggggtcgaggtgccgtaaagcagtaaatcggaagggtaaacggatgcccccatttagagcttgacggggaaagccggcgaacgtggcgagaaaggaagggaagaaagcgaaaggagcgggggctagggcggtgggaagtgtaggggtcacgctgggcgtaaccaccacacccgccgcgcttaatggggcgctacagggcgcgtggggatgatccactagtacggattagaagccgccgagcgggtgacagccctccgaaggaagactctcctccgtgcgtcctcgtcttcaccggtcgcgttcctgaaacgcagatgtgcctcgcgccgcactgctccgaacaataaagattctacaatactagcttttatggttatgaagaggaaaaattggcagtaacctggccccacaaaccttcaaatgaacgaatcaaattaacaaccataggatgataatgcgattagttttttagccttatttctggggtaattaatcagcgaagcgatgatttttgatctattaacagatatataaatgcaaaaactgcataaccactttaactaatactttcaacattttcggtttgtattacttcttattcaaatgtaataaaagtatcaacaaaaaattgttaatatacctctatactttaacgtcaaggagaaaaaaccccggatcggactactagcagctgtaatacgactcactatagggaatattaagcttaaacaatgaggcaggtttggttctcttggattgtgggattgttcctatgttttttcaacgtgtcttctgctgctccagtcaacactacaacagaagatgaaacggcacaaattccggctgaagctgtcatcggttactcagatttagaaggggatttcgatgttgctgttttgccattttccaacagcacaaataacgggttattgtttataaatactactattgccagcattgctgctaaagaagaaggggtatctctcgagaaaagagaggctgaagctatgccatgggaaaacttcttgaagtgcttctcccaatatatcccaaacaacgctactaacgggaagttagtttacactcaaaacaatccattatacatgtctgtcttaaactctactattcataacttaagatttacttccgatcggacccctaagccattggttatcgtcaccccatctcacgtctcccatatccaaggtactatcttatgttctaagaaggttggtttgcaaatccgtactagatctggtggtcacgactctgaaggtatgtcctatatctctcaagtcccatttgtcattgttgacttaagaaatatgagatccattaaaattgatgttcattctcaaactgcttgggtcgaagctggtgccaccttgggtgaagtttactactgggtcaacgaaaaaaacgaaaacttatctttagctgccggttactgtccaaccgtctgtgctggtggtcatttcggtggtggtggttacggtccattgatgcgtaactacggtttagctgctgacaacattattgacgctcatttagttaatgttcacggtaaggttttggacagaaaatctatgggtgaagatttattttgggccttgagaggtggtggtgctgaatccttcggtatcatcgttgcctggaagattcgtttagttgctgtcccttctaagtccaccatgttctccgtcaagaaaatcatggaaattcatgagttggtcaaattggttaacaagtggcaaaacatcgcttacaagtatgacaaggatttgttgttaatgactcacttcatcacccgtaatatcaccgacaaccaaggtaagaacaaaactgctattcacacctacttctcctccgtttttttgggtggtgtcgactccttagtcgatttgatgaacaaatcctttccagaattgggtattaagaaaactgattgtagacaattgtcttggattgacaccattatcttctattctggtgtcgttaactacgacaccgacaactttaacaaggaaattttgttggatcgttctgctggtcaaaatggtgccttcaaaatcaaattggactacgtcaaaaagccaatcccagaatctgttttcgttcaaattttggaaaagttgtacgaagaagacattggtgccggtatgtatgctttgtatccatatggtggtatcatggacgaaatttccgaatctgccatcccattcccacacagagctggtattttatatgaattgtggtacatctgttcttgggaaaagcaagaagacaacgaaaagcatttaaactggattagaaacatttacaacttcatgaccccatacgtttctaagaacccaagattagcctatttgaactaccgtgacttagatattggtattaatgacccaaagaacccaaacaactatactcaagccagaatttggggtgaaaagtacttcggtaagaacttcgatagattagttaaggttaaaactttggtcgatccaaacaacttcttcagaaacgaacaatccatcccaccattgccaagacatcgtcacggccatcatcaccatcaccattagctcgagcatgcatctagagggccgcatcatgtaattagttatgtcacgcttacattcacgccctccccccacatccgctctaaccgaaaaggaaggagttagacaacctgaagtctaggtccctatttatttttttatagttatgttagtattaagaacgttatttatatttcaaatttttcttttttttctgtacagacgcgtgtacgcatgtaacattatactgaaaaccttgcttgagaaggttttgggacgctcgaaggctttaatttgcggccctgcattaatgaatcggccaacgcgcggggagaggcggtttgcgtattgggcgctcttccgcttcctcgctcactgactcgctgcgctcggtcgttcggctgcggcgagcggtatcagctcactcaaaggcggtaatacggttatccacagaatcaggggataacgcaggaaagaacatgtgagcaaaaggccagcaaaagcccaggaaccgtaaaaaggccgcgttgctggcgtttttccataggctccgcccccctgacgagcatcacaaaaatcgacgctcaagtcagaggtggcgaaacccgacaggactataaagataccaggcgtttccccctggaagctccctcgtgcgctctcctgttccgaccctgccgcttaccggatacctgtccgcctttctcccttcgggaagcgtggcgctttctcatagctcacgctgtaggtatctcagttcggtgtaggtcgttcgctccaagctgggctgtgtgcacgaaccccccgttcagcccgaccgctgcgccttatccggtaactatcgtcttgagtccaacccggtaagacacgacttatcgccactggcagcagccactggtaacaggattagcagagcgaggtatgtaggcggtgctacagagttcttgaagtggtggcctaactacggctacactagaagaacagtatttggtatctgcgctctgctgaagccagttaccttcggaaaaagagttggtagctcttgatccggcaaacaaaccaccgctggtagcggtggtttttttgtttgcaagcagcagattacgcgcagaaaaaaaggatctcaagaagatcctttgatcttttctacggggtctgacgctcagtggaacgaaaactcacgttaagggattttggtcatgagattatcaaaaaggatcttcacctagatccttttaaattaaaaatgaagttttaaatcaatctaaagtatatatgagtaaacttggtctgacagttaccaatgcttaatcagtgaggcacctatctcagcgatctgtctatttcgttcatccatagttgcctgactccccgtcgtgtagataactacgatacgggagcgcttaccatctggccccagtgctgcaatgataccgcgagacccacgctcaccggctccagatttatcagcaataaaccagccagccggaagggccgagcgcagaagtggtcctgcaactttatccgcctccattcagtctattaattgttgccgggaagctagagtaagtagttcgccagttaatagtttgcgcaacgttgttggcattgctacaggcatcgtggtgtcactctcgtcgtttggtatggcttcattcagctccggttcccaacgatcaaggcgagttacatgatcccccatgttgtgcaaaaaagcggttagctccttcggtcctccgatcgttgtcagaagtaagttggccgcagtgttatcactcatggttatggcagcactgcataattctcttactgtcatgccatccgtaagatgcttttctgtgactggtgagtactcaaccaagtcattctgagaatagtgtatgcggcgaccgagttgctcttgcccggcgtcaatacgggataatagtgtatcacatagcagaactttaaaagtgctcatcattggaaaacgttcttcggggcgaaaactctcaaggatcttaccgctgttgagatccagttcgatgtaacccactcgtgcacccaactgatcttcagcatcttttactttcaccagcgtttctgggtgagcaaaaacaggaaggcaaaatgccgcaaaaaagggaataagggcgacacggaaatgttgaatactcatactcttcctttttcaatgggtaataactgatataattaaattgaagctctaatttgtgagtttagtatacatgcatttacttataatacagttttttagttttgctggccgcatcttctcaaatatgcttcccagcctgcttttctgtaacgttcaccctctaccttagcatcccttccctttgcaaatagtcctcttccaacaataataatgtcagatcctgtagagaccacatcatccacggttctatactgttgacccaatgcgtctcccttgtcatctaaacccacaccgggtgtcataatcaaccaatcgtaaccttcatctcttccacccatgtctctttgagcaataaagccgataacaaaatctttgtcgctcttcgcaatgtcaacagtacccttagtatattctccagtagatagggagcccttgcatgacaattctgctaacatcaaaaggcctctaggttcctttgttacttcttctgccgcctgcttcaaaccgctaacaatacctgggcccaccacaccgtgtgcattcgtaatgtctgcccattctgctattctgtatacacccgcagagtactgcaatttgactgtattaccaatgtcagcaaattttctgtcttcg

SEQ ID NO: 47 - DNA, 7266 bp, Artificial Sequence
  OXC154-A347G/L451G
aagagtaaaaaattgtacttggcggataatgcctttagcggcttaactgtgccctccatggaaaaatcagtcaagatatccacatgtgtttttagtaaacaaattttgggacctaatgcttcaactaactccagtaattccttggtggtacgaacatccaatgaagcacacaagtttgtttgcttttcgtgcatgatattaaatagcttggcagcaacaggactaggatgagtagcagcacgttccttatatgtagctttcgacatgatttatcttcgtttcctgcaggtttttgttctgtgcagttgggttaagaatactgggcaatttcatgtttcttcaacactacatatgcgtatatataccaatctaagtctgtgctccttccttcgttcttccttctgttcggagattaccgaatcaaaaaaatttcaaagaaaccgaaatcaaaaaaaagaataaaaaaaaaatgatgaattgaattgaaaagctagcttatcgatgataagctgtcaaagatgagaattaattccacggactatagactatactagatactccgtctactgtacgatacacttccgctcaggtccttgtcctttaacgaggccttaccactcttttgttactctattgatccagctcagcaaaggcagtgtgatctaagattctatcttcgcgatgtagtaaaactagctagaccgagaaagagactagaaatgcaaaaggcacttctacaatggctgccatcattattatccgatgtgacgctgcagcttctcaatgatattcgaatacgctttgaggagatacagcctaatatccgacaaactgttttacagatttacgatcgtacttgttacccatcattgaattttgaacatccgaacctgggagttttccctgaaacagatagtatatttgaacctgtataataatatatagtctagcgctttacggaagacaatgtatgtatttcggttcctggagaaactattgcatctattgcataggtaatcttgcacgtcgcatccccggttcattttctgcgtttccatcttgcacttcaatagcatatctttgttcgcttgcctgtaacttacacgcgcctcgtatcttttaatgatggaataatttgggaatttactctgtgtttatttatttttatgttttgtatttggattttagaaagtaaataaagaaggtagaagagttacggaatgaagaaaaaaaaataaacaaaggtttaaaaaatttcaacaaaaagcgtactttacatatatatttattagacaagaaaagcagattaaatagatatacattcgattaacgataagtaaaatgtaaaatcacaggattttcgtgtgtggtcttctacacagacaagatgaaacaattcggcattaatacctgagagcaggaagagcaagataaaaggtagtatttgttggcgatccccctagagtcttttacatcttcggaaaacaaaaactattttttctttaatttctttttttactttctatttttaatttatatatttatattaaaaaatttaaattataattatttttatagcacgtgatgaaaaggaccgggaagctccaccccggttgataatcagaaaagccccaaaaacaggaagattgtataagcaaatatttaaattgtaaacgttaatattttgttaaaattcgcgttaaatttttgttaaatcagctcattttttaacgaatagcccgaaatcggcaaaatcccttataaatcaaaagaatagaccgagatagggttgagtgttgttccagtttccaacaagagtccactattaaagaacgtggactccaacgtcaaagggcgaaaaagggtctatcagggcgatggcccactacgtgaaccatcaccctaatcaagttttttggggtcgaggtgccgtaaagcagtaaatcggaagggtaaacggatgcccccatttagagcttgacggggaaagccggcgaacgtggcgagaaaggaagggaagaaagcgaaaggagcgggggctagggcggtgggaagtgtaggggtcacgctgggcgtaaccaccacacccgccgcgcttaatggggcgctacagggcgcgtggggatgatccactagtacggattagaagccgccgagcgggtgacagccctccgaaggaagactctcctccgtgcgtcctcgtcttcaccggtcgcgttcctgaaacgcagatgtgcctcgcgccgcactgctccgaacaataaagattctacaatactagcttttatggttatgaagaggaaaaattggcagtaacctggccccacaaaccttcaaatgaacgaatcaaattaacaaccataggatgataatgcgattagttttttagccttatttctggggtaattaatcagcgaagcgatgatttttgatctattaacagatatataaatgcaaaaactgcataaccactttaactaatactttcaacattttcggtttgtattacttcttattcaaatgtaataaaagtatcaacaaaaaattgttaatatacctctatactttaacgtcaaggagaaaaaaccccggatcggactactagcagctgtaatacgactcactatagggaatattaagcttaaacaatgaggcaggtttggttctcttggattgtgggattgttcctatgttttttcaacgtgtcttctgctgctccagtcaacactacaacagaagatgaaacggcacaaattccggctgaagctgtcatcggttactcagatttagaaggggatttcgatgttgctgttttgccattttccaacagcacaaataacgggttattgtttataaatactactattgccagcattgctgctaaagaagaaggggtatctctcgagaaaagagaggctgaagctatgccaagagaaaacttcttgaagtgcttctcccaatatatcccaaacaacgctactaacttaaagttagtttacactcaaaacaatccattatacatgtctgtcttaaactctactattcataacttaagatttacttccgatactacccctaagccattggttatcgtcaccccatctcacgtctcccatatccaaggtactatcttatgttctaagaaggttggtttgcaaatccgtactagatctggtggtcacgactctgaaggtatgtcctatatctctcaagtcccatttgtcattgttgacttaagaaatatgagatccattaaaattgatgttcattctcaaactgcttgggtcgaagctggtgccaccttgggtgaagtttactactgggtcaacgaaaaaaacgaaaacttatctttagctgccggttactgtccaaccgtctgtgctggtggtcatttcggtggtggtggttacggtccattgatgcgtaactacggtttagctgctgacaacattattgacgctcatttagttaatgttcacggtaaggttttggacagaaaatctatgggtgaagatttattttgggccttgagaggtggtggtgctgaatccttcggtatcatcgttgcctggaagattcgtttagttgctgtcccttctaagtccaccatgttctccgtcaagaaaatcatggaaattcatgagttggtcaaattggttaacaagtggcaaaacatcgcttacaagtatgacaaggatttgttgttaatgactcacttcatcacccgtaatatcaccgacaaccaaggtaagaacaaaactgctattcacacctacttctcctccgtttttttgggtggtgtcgactccttagtcgatttgatgaacaaatcctttccagaattgggtattaagaaaactgattgtagacaattgtcttggattgacaccattatcttctattctggtgtcgttaactacgacaccgacaactttaacaaggaaattttgttggatcgttctgggggtcaaaatggtgccttcaaaatcaaattggactacgtcaaaaagccaatcccagaatctgttttcgttcaaattttggaaaagttgtacgaagaagacattggtgccggtatgtatgctttgtatccatatggtggtatcatggacgaaatttccgaatctgccatcccattcccacacagagctggtattttatatgaattgtggtacatctgttcttgggaaaagcaagaagacaacgaaaagcatttaaactggattagaaacatttacaacttcatgaccccatacgtttctaagaacccaagaggcgcctatttgaactaccgtgacttagatattggtattaatgacccaaagaacccaaacaactatactcaagccagaatttggggtgaaaagtacttcggtaagaacttcgatagattagttaaggttaaaactttggtcgatccaaacaacttcttcagaaacgaacaatccatcccaccattgccaagacatcgtcacggccatcatcaccatcaccattagctcgagcatgcatctagagggccgcatcatgtaattagttatgtcacgcttacattcacgccctccccccacatccgctctaaccgaaaaggaaggagttagacaacctgaagtctaggtccctatttatttttttatagttatgttagtattaagaacgttatttatatttcaaatttttcttttttttctgtacagacgcgtgtacgcatgtaacattatactgaaaaccttgcttgagaaggttttgggacgctcgaaggctttaatttgcggccctgcattaatgaatcggccaacgcgcggggagaggcggtttgcgtattgggcgctcttccgcttcctcgctcactgactcgctgcgctcggtcgttcggctgcggcgagcggtatcagctcactcaaaggcggtaatacggttatccacagaatcaggggataacgcaggaaagaacatgtgagcaaaaggccagcaaaagcccaggaaccgtaaaaaggccgcgttgctggcgtttttccataggctccgcccccctgacgagcatcacaaaaatcgacgctcaagtcagaggtggcgaaacccgacaggactataaagataccaggcgtttccccctggaagctccctcgtgcgctctcctgttccgaccctgccgcttaccggatacctgtccgcctttctcccttcgggaagcgtggcgctttctcatagctcacgctgtaggtatctcagttcggtgtaggtcgttcgctccaagctgggctgtgtgcacgaaccccccgttcagcccgaccgctgcgccttatccggtaactatcgtcttgagtccaacccggtaagacacgacttatcgccactggcagcagccactggtaacaggattagcagagcgaggtatgtaggcggtgctacagagttcttgaagtggtggcctaactacggctacactagaagaacagtatttggtatctgcgctctgctgaagccagttaccttcggaaaaagagttggtagctcttgatccggcaaacaaaccaccgctggtagcggtggtttttttgtttgcaagcagcagattacgcgcagaaaaaaaggatctcaagaagatcctttgatcttttctacggggtctgacgctcagtggaacgaaaactcacgttaagggattttggtcatgagattatcaaaaaggatcttcacctagatccttttaaattaaaaatgaagttttaaatcaatctaaagtatatatgagtaaacttggtctgacagttaccaatgcttaatcagtgaggcacctatctcagcgatctgtctatttcgttcatccatagttgcctgactccccgtcgtgtagataactacgatacgggagcgcttaccatctggccccagtgctgcaatgataccgcgagacccacgctcaccggctccagatttatcagcaataaaccagccagccggaagggccgagcgcagaagtggtcctgcaactttatccgcctccattcagtctattaattgttgccgggaagctagagtaagtagttcgccagttaatagtttgcgcaacgttgttggcattgctacaggcatcgtggtgtcactctcgtcgtttggtatggcttcattcagctccggttcccaacgatcaaggcgagttacatgatcccccatgttgtgcaaaaaagcggttagctccttcggtcctccgatcgttgtcagaagtaagttggccgcagtgttatcactcatggttatggcagcactgcataattctcttactgtcatgccatccgtaagatgcttttctgtgactggtgagtactcaaccaagtcattctgagaatagtgtatgcggcgaccgagttgctcttgcccggcgtcaatacgggataatagtgtatcacatagcagaactttaaaagtgctcatcattggaaaacgttcttcggggcgaaaactctcaaggatcttaccgctgttgagatccagttcgatgtaacccactcgtgcacccaactgatcttcagcatcttttactttcaccagcgtttctgggtgagcaaaaacaggaaggcaaaatgccgcaaaaaagggaataagggcgacacggaaatgttgaatactcatactcttcctttttcaatgggtaataactgatataattaaattgaagctctaatttgtgagtttagtatacatgcatttacttataatacagttttttagttttgctggccgcatcttctcaaatatgcttcccagcctgcttttctgtaacgttcaccctctaccttagcatcccttccctttgcaaatagtcctcttccaacaataataatgtcagatcctgtagagaccacatcatccacggttctatactgttgacccaatgcgtctcccttgtcatctaaacccacaccgggtgtcataatcaaccaatcgtaaccttcatctcttccacccatgtctctttgagcaataaagccgataacaaaatctttgtcgctcttcgcaatgtcaacagtacccttagtatattctccagtagatagggagcccttgcatgacaattctgctaacatcaaaaggcctctaggttcctttgttacttcttctgccgcctgcttcaaaccgctaacaatacctgggcccaccacaccgtgtgcattcgtaatgtctgcccattctgctattctgtatacacccgcagagtactgcaatttgactgtattaccaatgtcagcaaattttctgtcttcg

SEQ ID NO: 48 - DNA, 7266 bp, Artificial Sequence
  OXC154-A347G/I372L/A383V/L451G
aagagtaaaaaattgtacttggcggataatgcctttagcggcttaactgtgccctccatggaaaaatcagtcaagatatccacatgtgtttttagtaaacaaattttgggacctaatgcttcaactaactccagtaattccttggtggtacgaacatccaatgaagcacacaagtttgtttgcttttcgtgcatgatattaaatagcttggcagcaacaggactaggatgagtagcagcacgttccttatatgtagctttcgacatgatttatcttcgtttcctgcaggtttttgttctgtgcagttgggttaagaatactgggcaatttcatgtttcttcaacactacatatgcgtatatataccaatctaagtctgtgctccttccttcgttcttccttctgttcggagattaccgaatcaaaaaaatttcaaagaaaccgaaatcaaaaaaaagaataaaaaaaaaatgatgaattgaattgaaaagctagcttatcgatgataagctgtcaaagatgagaattaattccacggactatagactatactagatactccgtctactgtacgatacacttccgctcaggtccttgtcctttaacgaggccttaccactcttttgttactctattgatccagctcagcaaaggcagtgtgatctaagattctatcttcgcgatgtagtaaaactagctagaccgagaaagagactagaaatgcaaaaggcacttctacaatggctgccatcattattatccgatgtgacgctgcagcttctcaatgatattcgaatacgctttgaggagatacagcctaatatccgacaaactgttttacagatttacgatcgtacttgttacccatcattgaattttgaacatccgaacctgggagttttccctgaaacagatagtatatttgaacctgtataataatatatagtctagcgctttacggaagacaatgtatgtatttcggttcctggagaaactattgcatctattgcataggtaatcttgcacgtcgcatccccggttcattttctgcgtttccatcttgcacttcaatagcatatctttgttcgcttgcctgtaacttacacgcgcctcgtatcttttaatgatggaataatttgggaatttactctgtgtttatttatttttatgttttgtatttggattttagaaagtaaataaagaaggtagaagagttacggaatgaagaaaaaaaaataaacaaaggtttaaaaaatttcaacaaaaagcgtactttacatatatatttattagacaagaaaagcagattaaatagatatacattcgattaacgataagtaaaatgtaaaatcacaggattttcgtgtgtggtcttctacacagacaagatgaaacaattcggcattaatacctgagagcaggaagagcaagataaaaggtagtatttgttggcgatccccctagagtcttttacatcttcggaaaacaaaaactattttttctttaatttctttttttactttctatttttaatttatatatttatattaaaaaatttaaattataattatttttatagcacgtgatgaaaaggaccgggaagctccaccccggttgataatcagaaaagccccaaaaacaggaagattgtataagcaaatatttaaattgtaaacgttaatattttgttaaaattcgcgttaaatttttgttaaatcagctcattttttaacgaatagcccgaaatcggcaaaatcccttataaatcaaaagaatagaccgagatagggttgagtgttgttccagtttccaacaagagtccactattaaagaacgtggactccaacgtcaaagggcgaaaaagggtctatcagggcgatggcccactacgtgaaccatcaccctaatcaagttttttggggtcgaggtgccgtaaagcagtaaatcggaagggtaaacggatgcccccatttagagcttgacggggaaagccggcgaacgtggcgagaaaggaagggaagaaagcgaaaggagcgggggctagggcggtgggaagtgtaggggtcacgctgggcgtaaccaccacacccgccgcgcttaatggggcgctacagggcgcgtggggatgatccactagtacggattagaagccgccgagcgggtgacagccctccgaaggaagactctcctccgtgcgtcctcgtcttcaccggtcgcgttcctgaaacgcagatgtgcctcgcgccgcactgctccgaacaataaagattctacaatactagcttttatggttatgaagaggaaaaattggcagtaacctggccccacaaaccttcaaatgaacgaatcaaattaacaaccataggatgataatgcgattagttttttagccttatttctggggtaattaatcagcgaagcgatgatttttgatctattaacagatatataaatgcaaaaactgcataaccactttaactaatactttcaacattttcggtttgtattacttcttattcaaatgtaataaaagtatcaacaaaaaattgttaatatacctctatactttaacgtcaaggagaaaaaaccccggatcggactactagcagctgtaatacgactcactatagggaatattaagcttaaacaatgaggcaggtttggttctcttggattgtgggattgttcctatgttttttcaacgtgtcttctgctgctccagtcaacactacaacagaagatgaaacggcacaaattccggctgaagctgtcatcggttactcagatttagaaggggatttcgatgttgctgttttgccattttccaacagcacaaataacgggttattgtttataaatactactattgccagcattgctgctaaagaagaaggggtatctctcgagaaaagagaggctgaagctatgccaagagaaaacttcttgaagtgcttctcccaatatatcccaaacaacgctactaacttaaagttagtttacactcaaaacaatccattatacatgtctgtcttaaactctactattcataacttaagatttacttccgatactacccctaagccattggttatcgtcaccccatctcacgtctcccatatccaaggtactatcttatgttctaagaaggttggtttgcaaatccgtactagatctggtggtcacgactctgaaggtatgtcctatatctctcaagtcccatttgtcattgttgacttaagaaatatgagatccattaaaattgatgttcattctcaaactgcttgggtcgaagctggtgccaccttgggtgaagtttactactgggtcaacgaaaaaaacgaaaacttatctttagctgccggttactgtccaaccgtctgtgctggtggtcatttcggtggtggtggttacggtccattgatgcgtaactacggtttagctgctgacaacattattgacgctcatttagttaatgttcacggtaaggttttggacagaaaatctatgggtgaagatttattttgggccttgagaggtggtggtgctgaatccttcggtatcatcgttgcctggaagattcgtttagttgctgtcccttctaagtccaccatgttctccgtcaagaaaatcatggaaattcatgagttggtcaaattggttaacaagtggcaaaacatcgcttacaagtatgacaaggatttgttgttaatgactcacttcatcacccgtaatatcaccgacaaccaaggtaagaacaaaactgctattcacacctacttctcctccgtttttttgggtggtgtcgactccttagtcgatttgatgaacaaatcctttccagaattgggtattaagaaaactgattgtagacaattgtcttggattgacaccattatcttctattctggtgtcgttaactacgacaccgacaactttaacaaggaaattttgttggatcgttctgggggtcaaaatggtgccttcaaaatcaaattggactacgtcaaaaagccaatcccagaatctgttttcgttcaactgttggaaaagttgtacgaagaagacattggtgtgggtatgtatgctttgtatccatatggtggtatcatggacgaaatttccgaatctgccatcccattcccacacagagctggtattttatatgaattgtggtacatctgttcttgggaaaagcaagaagacaacgaaaagcatttaaactggattagaaacatttacaacttcatgaccccatacgtttctaagaacccaagaggcgcctatttgaactaccgtgacttagatattggtattaatgacccaaagaacccaaacaactatactcaagccagaatttggggtgaaaagtacttcggtaagaacttcgatagattagttaaggttaaaactttggtcgatccaaacaacttcttcagaaacgaacaatccatcccaccattgccaagacatcgtcacggccatcatcaccatcaccattagctcgagcatgcatctagagggccgcatcatgtaattagttatgtcacgcttacattcacgccctccccccacatccgctctaaccgaaaaggaaggagttagacaacctgaagtctaggtccctatttatttttttatagttatgttagtattaagaacgttatttatatttcaaatttttcttttttttctgtacagacgcgtgtacgcatgtaacattatactgaaaaccttgcttgagaaggttttgggacgctcgaaggctttaatttgcggccctgcattaatgaatcggccaacgcgcggggagaggcggtttgcgtattgggcgctcttccgcttcctcgctcactgactcgctgcgctcggtcgttcggctgcggcgagcggtatcagctcactcaaaggcggtaatacggttatccacagaatcaggggataacgcaggaaagaacatgtgagcaaaaggccagcaaaagcccaggaaccgtaaaaaggccgcgttgctggcgtttttccataggctccgcccccctgacgagcatcacaaaaatcgacgctcaagtcagaggtggcgaaacccgacaggactataaagataccaggcgtttccccctggaagctccctcgtgcgctctcctgttccgaccctgccgcttaccggatacctgtccgcctttctcccttcgggaagcgtggcgctttctcatagctcacgctgtaggtatctcagttcggtgtaggtcgttcgctccaagctgggctgtgtgcacgaaccccccgttcagcccgaccgctgcgccttatccggtaactatcgtcttgagtccaacccggtaagacacgacttatcgccactggcagcagccactggtaacaggattagcagagcgaggtatgtaggcggtgctacagagttcttgaagtggtggcctaactacggctacactagaagaacagtatttggtatctgcgctctgctgaagccagttaccttcggaaaaagagttggtagctcttgatccggcaaacaaaccaccgctggtagcggtggtttttttgtttgcaagcagcagattacgcgcagaaaaaaaggatctcaagaagatcctttgatcttttctacggggtctgacgctcagtggaacgaaaactcacgttaagggattttggtcatgagattatcaaaaaggatcttcacctagatccttttaaattaaaaatgaagttttaaatcaatctaaagtatatatgagtaaacttggtctgacagttaccaatgcttaatcagtgaggcacctatctcagcgatctgtctatttcgttcatccatagttgcctgactccccgtcgtgtagataactacgatacgggagcgcttaccatctggccccagtgctgcaatgataccgcgagacccacgctcaccggctccagatttatcagcaataaaccagccagccggaagggccgagcgcagaagtggtcctgcaactttatccgcctccattcagtctattaattgttgccgggaagctagagtaagtagttcgccagttaatagtttgcgcaacgttgttggcattgctacaggcatcgtggtgtcactctcgtcgtttggtatggcttcattcagctccggttcccaacgatcaaggcgagttacatgatcccccatgttgtgcaaaaaagcggttagctccttcggtcctccgatcgttgtcagaagtaagttggccgcagtgttatcactcatggttatggcagcactgcataattctcttactgtcatgccatccgtaagatgcttttctgtgactggtgagtactcaaccaagtcattctgagaatagtgtatgcggcgaccgagttgctcttgcccggcgtcaatacgggataatagtgtatcacatagcagaactttaaaagtgctcatcattggaaaacgttcttcggggcgaaaactctcaaggatcttaccgctgttgagatccagttcgatgtaacccactcgtgcacccaactgatcttcagcatcttttactttcaccagcgtttctgggtgagcaaaaacaggaaggcaaaatgccgcaaaaaagggaataagggcgacacggaaatgttgaatactcatactcttcctttttcaatgggtaataactgatataattaaattgaagctctaatttgtgagtttagtatacatgcatttacttataatacagttttttagttttgctggccgcatcttctcaaatatgcttcccagcctgcttttctgtaacgttcaccctctaccttagcatcccttccctttgcaaatagtcctcttccaacaataataatgtcagatcctgtagagaccacatcatccacggttctatactgttgacccaatgcgtctcccttgtcatctaaacccacaccgggtgtcataatcaaccaatcgtaaccttcatctcttccacccatgtctctttgagcaataaagccgataacaaaatctttgtcgctcttcgcaatgtcaacagtacccttagtatattctccagtagatagggagcccttgcatgacaattctgctaacatcaaaaggcctctaggttcctttgttacttcttctgccgcctgcttcaaaccgctaacaatacctgggcccaccacaccgtgtgcattcgtaatgtctgcccattctgctattctgtatacacccgcagagtactgcaatttgactgtattaccaatgtcagcaaattttctgtcttcg

SEQ ID NO: 49 - DNA, 7266 bp, Artificial Sequence
  OXC154-I372L/A383V/L451G
aagagtaaaaaattgtacttggcggataatgcctttagcggcttaactgtgccctccatggaaaaatcagtcaagatatccacatgtgtttttagtaaacaaattttgggacctaatgcttcaactaactccagtaattccttggtggtacgaacatccaatgaagcacacaagtttgtttgcttttcgtgcatgatattaaatagcttggcagcaacaggactaggatgagtagcagcacgttccttatatgtagctttcgacatgatttatcttcgtttcctgcaggtttttgttctgtgcagttgggttaagaatactgggcaatttcatgtttcttcaacactacatatgcgtatatataccaatctaagtctgtgctccttccttcgttcttccttctgttcggagattaccgaatcaaaaaaatttcaaagaaaccgaaatcaaaaaaaagaataaaaaaaaaatgatgaattgaattgaaaagctagcttatcgatgataagctgtcaaagatgagaattaattccacggactatagactatactagatactccgtctactgtacgatacacttccgctcaggtccttgtcctttaacgaggccttaccactcttttgttactctattgatccagctcagcaaaggcagtgtgatctaagattctatcttcgcgatgtagtaaaactagctagaccgagaaagagactagaaatgcaaaaggcacttctacaatggctgccatcattattatccgatgtgacgctgcagcttctcaatgatattcgaatacgctttgaggagatacagcctaatatccgacaaactgttttacagatttacgatcgtacttgttacccatcattgaattttgaacatccgaacctgggagttttccctgaaacagatagtatatttgaacctgtataataatatatagtctagcgctttacggaagacaatgtatgtatttcggttcctggagaaactattgcatctattgcataggtaatcttgcacgtcgcatccccggttcattttctgcgtttccatcttgcacttcaatagcatatctttgttcgcttgcctgtaacttacacgcgcctcgtatcttttaatgatggaataatttgggaatttactctgtgtttatttatttttatgttttgtatttggattttagaaagtaaataaagaaggtagaagagttacggaatgaagaaaaaaaaataaacaaaggtttaaaaaatttcaacaaaaagcgtactttacatatatatttattagacaagaaaagcagattaaatagatatacattcgattaacgataagtaaaatgtaaaatcacaggattttcgtgtgtggtcttctacacagacaagatgaaacaattcggcattaatacctgagagcaggaagagcaagataaaaggtagtatttgttggcgatccccctagagtcttttacatcttcggaaaacaaaaactattttttctttaatttctttttttactttctatttttaatttatatatttatattaaaaaatttaaattataattatttttatagcacgtgatgaaaaggaccgggaagctccaccccggttgataatcagaaaagccccaaaaacaggaagattgtataagcaaatatttaaattgtaaacgttaatattttgttaaaattcgcgttaaatttttgttaaatcagctcattttttaacgaatagcccgaaatcggcaaaatcccttataaatcaaaagaatagaccgagatagggttgagtgttgttccagtttccaacaagagtccactattaaagaacgtggactccaacgtcaaagggcgaaaaagggtctatcagggcgatggcccactacgtgaaccatcaccctaatcaagttttttggggtcgaggtgccgtaaagcagtaaatcggaagggtaaacggatgcccccatttagagcttgacggggaaagccggcgaacgtggcgagaaaggaagggaagaaagcgaaaggagcgggggctagggcggtgggaagtgtaggggtcacgctgggcgtaaccaccacacccgccgcgcttaatggggcgctacagggcgcgtggggatgatccactagtacggattagaagccgccgagcgggtgacagccctccgaaggaagactctcctccgtgcgtcctcgtcttcaccggtcgcgttcctgaaacgcagatgtgcctcgcgccgcactgctccgaacaataaagattctacaatactagcttttatggttatgaagaggaaaaattggcagtaacctggccccacaaaccttcaaatgaacgaatcaaattaacaaccataggatgataatgcgattagttttttagccttatttctggggtaattaatcagcgaagcgatgatttttgatctattaacagatatataaatgcaaaaactgcataaccactttaactaatactttcaacattttcggtttgtattacttcttattcaaatgtaataaaagtatcaacaaaaaattgttaatatacctctatactttaacgtcaaggagaaaaaaccccggatcggactactagcagctgtaatacgactcactatagggaatattaagcttaaacaatgaggcaggtttggttctcttggattgtgggattgttcctatgttttttcaacgtgtcttctgctgctccagtcaacactacaacagaagatgaaacggcacaaattccggctgaagctgtcatcggttactcagatttagaaggggatttcgatgttgctgttttgccattttccaacagcacaaataacgggttattgtttataaatactactattgccagcattgctgctaaagaagaaggggtatctctcgagaaaagagaggctgaagctatgccaagagaaaacttcttgaagtgcttctcccaatatatcccaaacaacgctactaacttaaagttagtttacactcaaaacaatccattatacatgtctgtcttaaactctactattcataacttaagatttacttccgatactacccctaagccattggttatcgtcaccccatctcacgtctcccatatccaaggtactatcttatgttctaagaaggttggtttgcaaatccgtactagatctggtggtcacgactctgaaggtatgtcctatatctctcaagtcccatttgtcattgttgacttaagaaatatgagatccattaaaattgatgttcattctcaaactgcttgggtcgaagctggtgccaccttgggtgaagtttactactgggtcaacgaaaaaaacgaaaacttatctttagctgccggttactgtccaaccgtctgtgctggtggtcatttcggtggtggtggttacggtccattgatgcgtaactacggtttagctgctgacaacattattgacgctcatttagttaatgttcacggtaaggttttggacagaaaatctatgggtgaagatttattttgggccttgagaggtggtggtgctgaatccttcggtatcatcgttgcctggaagattcgtttagttgctgtcccttctaagtccaccatgttctccgtcaagaaaatcatggaaattcatgagttggtcaaattggttaacaagtggcaaaacatcgcttacaagtatgacaaggatttgttgttaatgactcacttcatcacccgtaatatcaccgacaaccaaggtaagaacaaaactgctattcacacctacttctcctccgtttttttgggtggtgtcgactccttagtcgatttgatgaacaaatcctttccagaattgggtattaagaaaactgattgtagacaattgtcttggattgacaccattatcttctattctggtgtcgttaactacgacaccgacaactttaacaaggaaattttgttggatcgttctgctggtcaaaatggtgccttcaaaatcaaattggactacgtcaaaaagccaatcccagaatctgttttcgttcaactgttggaaaagttgtacgaagaagacattggtgtgggtatgtatgctttgtatccatatggtggtatcatggacgaaatttccgaatctgccatcccattcccacacagagctggtattttatatgaattgtggtacatctgttcttgggaaaagcaagaagacaacgaaaagcatttaaactggattagaaacatttacaacttcatgaccccatacgtttctaagaacccaagaggcgcctatttgaactaccgtgacttagatattggtattaatgacccaaagaacccaaacaactatactcaagccagaatttggggtgaaaagtacttcggtaagaacttcgatagattagttaaggttaaaactttggtcgatccaaacaacttcttcagaaacgaacaatccatcccaccattgccaagacatcgtcacggccatcatcaccatcaccattagctcgagcatgcatctagagggccgcatcatgtaattagttatgtcacgcttacattcacgccctccccccacatccgctctaaccgaaaaggaaggagttagacaacctgaagtctaggtccctatttatttttttatagttatgttagtattaagaacgttatttatatttcaaatttttcttttttttctgtacagacgcgtgtacgcatgtaacattatactgaaaaccttgcttgagaaggttttgggacgctcgaaggctttaatttgcggccctgcattaatgaatcggccaacgcgcggggagaggcggtttgcgtattgggcgctcttccgcttcctcgctcactgactcgctgcgctcggtcgttcggctgcggcgagcggtatcagctcactcaaaggcggtaatacggttatccacagaatcaggggataacgcaggaaagaacatgtgagcaaaaggccagcaaaagcccaggaaccgtaaaaaggccgcgttgctggcgtttttccataggctccgcccccctgacgagcatcacaaaaatcgacgctcaagtcagaggtggcgaaacccgacaggactataaagataccaggcgtttccccctggaagctccctcgtgcgctctcctgttccgaccctgccgcttaccggatacctgtccgcctttctcccttcgggaagcgtggcgctttctcatagctcacgctgtaggtatctcagttcggtgtaggtcgttcgctccaagctgggctgtgtgcacgaaccccccgttcagcccgaccgctgcgccttatccggtaactatcgtcttgagtccaacccggtaagacacgacttatcgccactggcagcagccactggtaacaggattagcagagcgaggtatgtaggcggtgctacagagttcttgaagtggtggcctaactacggctacactagaagaacagtatttggtatctgcgctctgctgaagccagttaccttcggaaaaagagttggtagctcttgatccggcaaacaaaccaccgctggtagcggtggtttttttgtttgcaagcagcagattacgcgcagaaaaaaaggatctcaagaagatcctttgatcttttctacggggtctgacgctcagtggaacgaaaactcacgttaagggattttggtcatgagattatcaaaaaggatcttcacctagatccttttaaattaaaaatgaagttttaaatcaatctaaagtatatatgagtaaacttggtctgacagttaccaatgcttaatcagtgaggcacctatctcagcgatctgtctatttcgttcatccatagttgcctgactccccgtcgtgtagataactacgatacgggagcgcttaccatctggccccagtgctgcaatgataccgcgagacccacgctcaccggctccagatttatcagcaataaaccagccagccggaagggccgagcgcagaagtggtcctgcaactttatccgcctccattcagtctattaattgttgccgggaagctagagtaagtagttcgccagttaatagtttgcgcaacgttgttggcattgctacaggcatcgtggtgtcactctcgtcgtttggtatggcttcattcagctccggttcccaacgatcaaggcgagttacatgatcccccatgttgtgcaaaaaagcggttagctccttcggtcctccgatcgttgtcagaagtaagttggccgcagtgttatcactcatggttatggcagcactgcataattctcttactgtcatgccatccgtaagatgcttttctgtgactggtgagtactcaaccaagtcattctgagaatagtgtatgcggcgaccgagttgctcttgcccggcgtcaatacgggataatagtgtatcacatagcagaactttaaaagtgctcatcattggaaaacgttcttcggggcgaaaactctcaaggatcttaccgctgttgagatccagttcgatgtaacccactcgtgcacccaactgatcttcagcatcttttactttcaccagcgtttctgggtgagcaaaaacaggaaggcaaaatgccgcaaaaaagggaataagggcgacacggaaatgttgaatactcatactcttcctttttcaatgggtaataactgatataattaaattgaagctctaatttgtgagtttagtatacatgcatttacttataatacagttttttagttttgctggccgcatcttctcaaatatgcttcccagcctgcttttctgtaacgttcaccctctaccttagcatcccttccctttgcaaatagtcctcttccaacaataataatgtcagatcctgtagagaccacatcatccacggttctatactgttgacccaatgcgtctcccttgtcatctaaacccacaccgggtgtcataatcaaccaatcgtaaccttcatctcttccacccatgtctctttgagcaataaagccgataacaaaatctttgtcgctcttcgcaatgtcaacagtacccttagtatattctccagtagatagggagcccttgcatgacaattctgctaacatcaaaaggcctctaggttcctttgttacttcttctgccgcctgcttcaaaccgctaacaatacctgggcccaccacaccgtgtgcattcgtaatgtctgcccattctgctattctgtatacacccgcagagtactgcaatttgactgtattaccaatgtcagcaaattttctgtcttcg

SEQ ID NO: 50 - DNA, 7266 bp, Artificial Sequence
  OXC154-R3V/T49R/S88A(=GCT)
aagagtaaaaaattgtacttggcggataatgcctttagcggcttaactgtgccctccatggaaaaatcagtcaagatatccacatgtgtttttagtaaacaaattttgggacctaatgcttcaactaactccagtaattccttggtggtacgaacatccaatgaagcacacaagtttgtttgcttttcgtgcatgatattaaatagcttggcagcaacaggactaggatgagtagcagcacgttccttatatgtagctttcgacatgatttatcttcgtttcctgcaggtttttgttctgtgcagttgggttaagaatactgggcaatttcatgtttcttcaacactacatatgcgtatatataccaatctaagtctgtgctccttccttcgttcttccttctgttcggagattaccgaatcaaaaaaatttcaaagaaaccgaaatcaaaaaaaagaataaaaaaaaaatgatgaattgaattgaaaagctagcttatcgatgataagctgtcaaagatgagaattaattccacggactatagactatactagatactccgtctactgtacgatacacttccgctcaggtccttgtcctttaacgaggccttaccactcttttgttactctattgatccagctcagcaaaggcagtgtgatctaagattctatcttcgcgatgtagtaaaactagctagaccgagaaagagactagaaatgcaaaaggcacttctacaatggctgccatcattattatccgatgtgacgctgcagcttctcaatgatattcgaatacgctttgaggagatacagcctaatatccgacaaactgttttacagatttacgatcgtacttgttacccatcattgaattttgaacatccgaacctgggagttttccctgaaacagatagtatatttgaacctgtataataatatatagtctagcgctttacggaagacaatgtatgtatttcggttcctggagaaactattgcatctattgcataggtaatcttgcacgtcgcatccccggttcattttctgcgtttccatcttgcacttcaatagcatatctttgttcgcttgcctgtaacttacacgcgcctcgtatcttttaatgatggaataatttgggaatttactctgtgtttatttatttttatgttttgtatttggattttagaaagtaaataaagaaggtagaagagttacggaatgaagaaaaaaaaataaacaaaggtttaaaaaatttcaacaaaaagcgtactttacatatatatttattagacaagaaaagcagattaaatagatatacattcgattaacgataagtaaaatgtaaaatcacaggattttcgtgtgtggtcttctacacagacaagatgaaacaattcggcattaatacctgagagcaggaagagcaagataaaaggtagtatttgttggcgatccccctagagtcttttacatcttcggaaaacaaaaactattttttctttaatttctttttttactttctatttttaatttatatatttatattaaaaaatttaaattataattatttttatagcacgtgatgaaaaggaccgggaagctccaccccggttgataatcagaaaagccccaaaaacaggaagattgtataagcaaatatttaaattgtaaacgttaatattttgttaaaattcgcgttaaatttttgttaaatcagctcattttttaacgaatagcccgaaatcggcaaaatcccttataaatcaaaagaatagaccgagatagggttgagtgttgttccagtttccaacaagagtccactattaaagaacgtggactccaacgtcaaagggcgaaaaagggtctatcagggcgatggcccactacgtgaaccatcaccctaatcaagttttttggggtcgaggtgccgtaaagcagtaaatcggaagggtaaacggatgcccccatttagagcttgacggggaaagccggcgaacgtggcgagaaaggaagggaagaaagcgaaaggagcgggggctagggcggtgggaagtgtaggggtcacgctgggcgtaaccaccacacccgccgcgcttaatggggcgctacagggcgcgtggggatgatccactagtacggattagaagccgccgagcgggtgacagccctccgaaggaagactctcctccgtgcgtcctcgtcttcaccggtcgcgttcctgaaacgcagatgtgcctcgcgccgcactgctccgaacaataaagattctacaatactagcttttatggttatgaagaggaaaaattggcagtaacctggccccacaaaccttcaaatgaacgaatcaaattaacaaccataggatgataatgcgattagttttttagccttatttctggggtaattaatcagcgaagcgatgatttttgatctattaacagatatataaatgcaaaaactgcataaccactttaactaatactttcaacattttcggtttgtattacttcttattcaaatgtaataaaagtatcaacaaaaaattgttaatatacctctatactttaacgtcaaggagaaaaaaccccggatcggactactagcagctgtaatacgactcactatagggaatattaagcttaaacaatgaggcaggtttggttctcttggattgtgggattgttcctatgttttttcaacgtgtcttctgctgctccagtcaacactacaacagaagatgaaacggcacaaattccggctgaagctgtcatcggttactcagatttagaaggggatttcgatgttgctgttttgccattttccaacagcacaaataacgggttattgtttataaatactactattgccagcattgctgctaaagaagaaggggtatctctcgagaaaagagaggctgaagctatgccagtcgaaaacttcttgaagtgcttctcccaatatatcccaaacaacgctactaacttaaagttagtttacactcaaaacaatccattatacatgtctgtcttaaactctactattcataacttaagatttacttccgatcggacccctaagccattggttatcgtcaccccatctcacgtctcccatatccaaggtactatcttatgttctaagaaggttggtttgcaaatccgtactagatctggtggtcacgacgctgaaggtatgtcctatatctctcaagtcccatttgtcattgttgacttaagaaatatgagatccattaaaattgatgttcattctcaaactgcttgggtcgaagctggtgccaccttgggtgaagtttactactgggtcaacgaaaaaaacgaaaacttatctttagctgccggttactgtccaaccgtctgtgctggtggtcatttcggtggtggtggttacggtccattgatgcgtaactacggtttagctgctgacaacattattgacgctcatttagttaatgttcacggtaaggttttggacagaaaatctatgggtgaagatttattttgggccttgagaggtggtggtgctgaatccttcggtatcatcgttgcctggaagattcgtttagttgctgtcccttctaagtccaccatgttctccgtcaagaaaatcatggaaattcatgagttggtcaaattggttaacaagtggcaaaacatcgcttacaagtatgacaaggatttgttgttaatgactcacttcatcacccgtaatatcaccgacaaccaaggtaagaacaaaactgctattcacacctacttctcctccgtttttttgggtggtgtcgactccttagtcgatttgatgaacaaatcctttccagaattgggtattaagaaaactgattgtagacaattgtcttggattgacaccattatcttctattctggtgtcgttaactacgacaccgacaactttaacaaggaaattttgttggatcgttctgctggtcaaaatggtgccttcaaaatcaaattggactacgtcaaaaagccaatcccagaatctgttttcgttcaaattttggaaaagttgtacgaagaagacattggtgccggtatgtatgctttgtatccatatggtggtatcatggacgaaatttccgaatctgccatcccattcccacacagagctggtattttatatgaattgtggtacatctgttcttgggaaaagcaagaagacaacgaaaagcatttaaactggattagaaacatttacaacttcatgaccccatacgtttctaagaacccaagattagcctatttgaactaccgtgacttagatattggtattaatgacccaaagaacccaaacaactatactcaagccagaatttggggtgaaaagtacttcggtaagaacttcgatagattagttaaggttaaaactttggtcgatccaaacaacttcttcagaaacgaacaatccatcccaccattgccaagacatcgtcacggccatcatcaccatcaccattagctcgagcatgcatctagagggccgcatcatgtaattagttatgtcacgcttacattcacgccctccccccacatccgctctaaccgaaaaggaaggagttagacaacctgaagtctaggtccctatttatttttttatagttatgttagtattaagaacgttatttatatttcaaatttttcttttttttctgtacagacgcgtgtacgcatgtaacattatactgaaaaccttgcttgagaaggttttgggacgctcgaaggctttaatttgcggccctgcattaatgaatcggccaacgcgcggggagaggcggtttgcgtattgggcgctcttccgcttcctcgctcactgactcgctgcgctcggtcgttcggctgcggcgagcggtatcagctcactcaaaggcggtaatacggttatccacagaatcaggggataacgcaggaaagaacatgtgagcaaaaggccagcaaaagcccaggaaccgtaaaaaggccgcgttgctggcgtttttccataggctccgcccccctgacgagcatcacaaaaatcgacgctcaagtcagaggtggcgaaacccgacaggactataaagataccaggcgtttccccctggaagctccctcgtgcgctctcctgttccgaccctgccgcttaccggatacctgtccgcctttctcccttcgggaagcgtggcgctttctcatagctcacgctgtaggtatctcagttcggtgtaggtcgttcgctccaagctgggctgtgtgcacgaaccccccgttcagcccgaccgctgcgccttatccggtaactatcgtcttgagtccaacccggtaagacacgacttatcgccactggcagcagccactggtaacaggattagcagagcgaggtatgtaggcggtgctacagagttcttgaagtggtggcctaactacggctacactagaagaacagtatttggtatctgcgctctgctgaagccagttaccttcggaaaaagagttggtagctcttgatccggcaaacaaaccaccgctggtagcggtggtttttttgtttgcaagcagcagattacgcgcagaaaaaaaggatctcaagaagatcctttgatcttttctacggggtctgacgctcagtggaacgaaaactcacgttaagggattttggtcatgagattatcaaaaaggatcttcacctagatccttttaaattaaaaatgaagttttaaatcaatctaaagtatatatgagtaaacttggtctgacagttaccaatgcttaatcagtgaggcacctatctcagcgatctgtctatttcgttcatccatagttgcctgactccccgtcgtgtagataactacgatacgggagcgcttaccatctggccccagtgctgcaatgataccgcgagacccacgctcaccggctccagatttatcagcaataaaccagccagccggaagggccgagcgcagaagtggtcctgcaactttatccgcctccattcagtctattaattgttgccgggaagctagagtaagtagttcgccagttaatagtttgcgcaacgttgttggcattgctacaggcatcgtggtgtcactctcgtcgtttggtatggcttcattcagctccggttcccaacgatcaaggcgagttacatgatcccccatgttgtgcaaaaaagcggttagctccttcggtcctccgatcgttgtcagaagtaagttggccgcagtgttatcactcatggttatggcagcactgcataattctcttactgtcatgccatccgtaagatgcttttctgtgactggtgagtactcaaccaagtcattctgagaatagtgtatgcggcgaccgagttgctcttgcccggcgtcaatacgggataatagtgtatcacatagcagaactttaaaagtgctcatcattggaaaacgttcttcggggcgaaaactctcaaggatcttaccgctgttgagatccagttcgatgtaacccactcgtgcacccaactgatcttcagcatcttttactttcaccagcgtttctgggtgagcaaaaacaggaaggcaaaatgccgcaaaaaagggaataagggcgacacggaaatgttgaatactcatactcttcctttttcaatgggtaataactgatataattaaattgaagctctaatttgtgagtttagtatacatgcatttacttataatacagttttttagttttgctggccgcatcttctcaaatatgcttcccagcctgcttttctgtaacgttcaccctctaccttagcatcccttccctttgcaaatagtcctcttccaacaataataatgtcagatcctgtagagaccacatcatccacggttctatactgttgacccaatgcgtctcccttgtcatctaaacccacaccgggtgtcataatcaaccaatcgtaaccttcatctcttccacccatgtctctttgagcaataaagccgataacaaaatctttgtcgctcttcgcaatgtcaacagtacccttagtatattctccagtagatagggagcccttgcatgacaattctgctaacatcaaaaggcctctaggttcctttgttacttcttctgccgcctgcttcaaaccgctaacaatacctgggcccaccacaccgtgtgcattcgtaatgtctgcccattctgctattctgtatacacccgcagagtactgcaatttgactgtattaccaatgtcagcaaattttctgtcttcg

SEQ ID NO: 51 - DNA, 7266 bp, Artificial Sequence
  OXC154-R3G(=GGG)/A18E/S60T
aagagtaaaaaattgtacttggcggataatgcctttagcggcttaactgtgccctccatggaaaaatcagtcaagatatccacatgtgtttttagtaaacaaattttgggacctaatgcttcaactaactccagtaattccttggtggtacgaacatccaatgaagcacacaagtttgtttgcttttcgtgcatgatattaaatagcttggcagcaacaggactaggatgagtagcagcacgttccttatatgtagctttcgacatgatttatcttcgtttcctgcaggtttttgttctgtgcagttgggttaagaatactgggcaatttcatgtttcttcaacactacatatgcgtatatataccaatctaagtctgtgctccttccttcgttcttccttctgttcggagattaccgaatcaaaaaaatttcaaagaaaccgaaatcaaaaaaaagaataaaaaaaaaatgatgaattgaattgaaaagctagcttatcgatgataagctgtcaaagatgagaattaattccacggactatagactatactagatactccgtctactgtacgatacacttccgctcaggtccttgtcctttaacgaggccttaccactcttttgttactctattgatccagctcagcaaaggcagtgtgatctaagattctatcttcgcgatgtagtaaaactagctagaccgagaaagagactagaaatgcaaaaggcacttctacaatggctgccatcattattatccgatgtgacgctgcagcttctcaatgatattcgaatacgctttgaggagatacagcctaatatccgacaaactgttttacagatttacgatcgtacttgttacccatcattgaattttgaacatccgaacctgggagttttccctgaaacagatagtatatttgaacctgtataataatatatagtctagcgctttacggaagacaatgtatgtatttcggttcctggagaaactattgcatctattgcataggtaatcttgcacgtcgcatccccggttcattttctgcgtttccatcttgcacttcaatagcatatctttgttcgcttgcctgtaacttacacgcgcctcgtatcttttaatgatggaataatttgggaatttactctgtgtttatttatttttatgttttgtatttggattttagaaagtaaataaagaaggtagaagagttacggaatgaagaaaaaaaaataaacaaaggtttaaaaaatttcaacaaaaagcgtactttacatatatatttattagacaagaaaagcagattaaatagatatacattcgattaacgataagtaaaatgtaaaatcacaggattttcgtgtgtggtcttctacacagacaagatgaaacaattcggcattaatacctgagagcaggaagagcaagataaaaggtagtatttgttggcgatccccctagagtcttttacatcttcggaaaacaaaaactattttttctttaatttctttttttactttctatttttaatttatatatttatattaaaaaatttaaattataattatttttatagcacgtgatgaaaaggaccgggaagctccaccccggttgataatcagaaaagccccaaaaacaggaagattgtataagcaaatatttaaattgtaaacgttaatattttgttaaaattcgcgttaaatttttgttaaatcagctcattttttaacgaatagcccgaaatcggcaaaatcccttataaatcaaaagaatagaccgagatagggttgagtgttgttccagtttccaacaagagtccactattaaagaacgtggactccaacgtcaaagggcgaaaaagggtctatcagggcgatggcccactacgtgaaccatcaccctaatcaagttttttggggtcgaggtgccgtaaagcagtaaatcggaagggtaaacggatgcccccatttagagcttgacggggaaagccggcgaacgtggcgagaaaggaagggaagaaagcgaaaggagcgggggctagggcggtgggaagtgtaggggtcacgctgggcgtaaccaccacacccgccgcgcttaatggggcgctacagggcgcgtggggatgatccactagtacggattagaagccgccgagcgggtgacagccctccgaaggaagactctcctccgtgcgtcctcgtcttcaccggtcgcgttcctgaaacgcagatgtgcctcgcgccgcactgctccgaacaataaagattctacaatactagcttttatggttatgaagaggaaaaattggcagtaacctggccccacaaaccttcaaatgaacgaatcaaattaacaaccataggatgataatgcgattagttttttagccttatttctggggtaattaatcagcgaagcgatgatttttgatctattaacagatatataaatgcaaaaactgcataaccactttaactaatactttcaacattttcggtttgtattacttcttattcaaatgtaataaaagtatcaacaaaaaattgttaatatacctctatactttaacgtcaaggagaaaaaaccccggatcggactactagcagctgtaatacgactcactatagggaatattaagcttaaacaatgaggcaggtttggttctcttggattgtgggattgttcctatgttttttcaacgtgtcttctgctgctccagtcaacactacaacagaagatgaaacggcacaaattccggctgaagctgtcatcggttactcagatttagaaggggatttcgatgttgctgttttgccattttccaacagcacaaataacgggttattgtttataaatactactattgccagcattgctgctaaagaagaaggggtatctctcgagaaaagagaggctgaagctatgccaggggaaaacttcttgaagtgcttctcccaatatatcccaaacaacgagactaacttaaagttagtttacactcaaaacaatccattatacatgtctgtcttaaactctactattcataacttaagatttacttccgatactacccctaagccattggttatcgtcaccccaacgcacgtctcccatatccaaggtactatcttatgttctaagaaggttggtttgcaaatccgtactagatctggtggtcacgactctgaaggtatgtcctatatctctcaagtcccatttgtcattgttgacttaagaaatatgagatccattaaaattgatgttcattctcaaactgcttgggtcgaagctggtgccaccttgggtgaagtttactactgggtcaacgaaaaaaacgaaaacttatctttagctgccggttactgtccaaccgtctgtgctggtggtcatttcggtggtggtggttacggtccattgatgcgtaactacggtttagctgctgacaacattattgacgctcatttagttaatgttcacggtaaggttttggacagaaaatctatgggtgaagatttattttgggccttgagaggtggtggtgctgaatccttcggtatcatcgttgcctggaagattcgtttagttgctgtcccttctaagtccaccatgttctccgtcaagaaaatcatggaaattcatgagttggtcaaattggttaacaagtggcaaaacatcgcttacaagtatgacaaggatttgttgttaatgactcacttcatcacccgtaatatcaccgacaaccaaggtaagaacaaaactgctattcacacctacttctcctccgtttttttgggtggtgtcgactccttagtcgatttgatgaacaaatcctttccagaattgggtattaagaaaactgattgtagacaattgtcttggattgacaccattatcttctattctggtgtcgttaactacgacaccgacaactttaacaaggaaattttgttggatcgttctgctggtcaaaatggtgccttcaaaatcaaattggactacgtcaaaaagccaatcccagaatctgttttcgttcaaattttggaaaagttgtacgaagaagacattggtgccggtatgtatgctttgtatccatatggtggtatcatggacgaaatttccgaatctgccatcccattcccacacagagctggtattttatatgaattgtggtacatctgttcttgggaaaagcaagaagacaacgaaaagcatttaaactggattagaaacatttacaacttcatgaccccatacgtttctaagaacccaagattagcctatttgaactaccgtgacttagatattggtattaatgacccaaagaacccaaacaactatactcaagccagaatttggggtgaaaagtacttcggtaagaacttcgatagattagttaaggttaaaactttggtcgatccaaacaacttcttcagaaacgaacaatccatcccaccattgccaagacatcgtcacggccatcatcaccatcaccattagctcgagcatgcatctagagggccgcatcatgtaattagttatgtcacgcttacattcacgccctccccccacatccgctctaaccgaaaaggaaggagttagacaacctgaagtctaggtccctatttatttttttatagttatgttagtattaagaacgttatttatatttcaaatttttcttttttttctgtacagacgcgtgtacgcatgtaacattatactgaaaaccttgcttgagaaggttttgggacgctcgaaggctttaatttgcggccctgcattaatgaatcggccaacgcgcggggagaggcggtttgcgtattgggcgctcttccgcttcctcgctcactgactcgctgcgctcggtcgttcggctgcggcgagcggtatcagctcactcaaaggcggtaatacggttatccacagaatcaggggataacgcaggaaagaacatgtgagcaaaaggccagcaaaagcccaggaaccgtaaaaaggccgcgttgctggcgtttttccataggctccgcccccctgacgagcatcacaaaaatcgacgctcaagtcagaggtggcgaaacccgacaggactataaagataccaggcgtttccccctggaagctccctcgtgcgctctcctgttccgaccctgccgcttaccggatacctgtccgcctttctcccttcgggaagcgtggcgctttctcatagctcacgctgtaggtatctcagttcggtgtaggtcgttcgctccaagctgggctgtgtgcacgaaccccccgttcagcccgaccgctgcgccttatccggtaactatcgtcttgagtccaacccggtaagacacgacttatcgccactggcagcagccactggtaacaggattagcagagcgaggtatgtaggcggtgctacagagttcttgaagtggtggcctaactacggctacactagaagaacagtatttggtatctgcgctctgctgaagccagttaccttcggaaaaagagttggtagctcttgatccggcaaacaaaccaccgctggtagcggtggtttttttgtttgcaagcagcagattacgcgcagaaaaaaaggatctcaagaagatcctttgatcttttctacggggtctgacgctcagtggaacgaaaactcacgttaagggattttggtcatgagattatcaaaaaggatcttcacctagatccttttaaattaaaaatgaagttttaaatcaatctaaagtatatatgagtaaacttggtctgacagttaccaatgcttaatcagtgaggcacctatctcagcgatctgtctatttcgttcatccatagttgcctgactccccgtcgtgtagataactacgatacgggagcgcttaccatctggccccagtgctgcaatgataccgcgagacccacgctcaccggctccagatttatcagcaataaaccagccagccggaagggccgagcgcagaagtggtcctgcaactttatccgcctccattcagtctattaattgttgccgggaagctagagtaagtagttcgccagttaatagtttgcgcaacgttgttggcattgctacaggcatcgtggtgtcactctcgtcgtttggtatggcttcattcagctccggttcccaacgatcaaggcgagttacatgatcccccatgttgtgcaaaaaagcggttagctccttcggtcctccgatcgttgtcagaagtaagttggccgcagtgttatcactcatggttatggcagcactgcataattctcttactgtcatgccatccgtaagatgcttttctgtgactggtgagtactcaaccaagtcattctgagaatagtgtatgcggcgaccgagttgctcttgcccggcgtcaatacgggataatagtgtatcacatagcagaactttaaaagtgctcatcattggaaaacgttcttcggggcgaaaactctcaaggatcttaccgctgttgagatccagttcgatgtaacccactcgtgcacccaactgatcttcagcatcttttactttcaccagcgtttctgggtgagcaaaaacaggaaggcaaaatgccgcaaaaaagggaataagggcgacacggaaatgttgaatactcatactcttcctttttcaatgggtaataactgatataattaaattgaagctctaatttgtgagtttagtatacatgcatttacttataatacagttttttagttttgctggccgcatcttctcaaatatgcttcccagcctgcttttctgtaacgttcaccctctaccttagcatcccttccctttgcaaatagtcctcttccaacaataataatgtcagatcctgtagagaccacatcatccacggttctatactgttgacccaatgcgtctcccttgtcatctaaacccacaccgggtgtcataatcaaccaatcgtaaccttcatctcttccacccatgtctctttgagcaataaagccgataacaaaatctttgtcgctcttcgcaatgtcaacagtacccttagtatattctccagtagatagggagcccttgcatgacaattctgctaacatcaaaaggcctctaggttcctttgttacttcttctgccgcctgcttcaaaccgctaacaatacctgggcccaccacaccgtgtgcattcgtaatgtctgcccattctgctattctgtatacacccgcagagtactgcaatttgactgtattaccaatgtcagcaaattttctgtcttcg

SEQ ID NO: 52 - DNA, 7266 bp, Artificial Sequence
  OXC154-A347G/I372L/A383V
aagagtaaaaaattgtacttggcggataatgcctttagcggcttaactgtgccctccatggaaaaatcagtcaagatatccacatgtgtttttagtaaacaaattttgggacctaatgcttcaactaactccagtaattccttggtggtacgaacatccaatgaagcacacaagtttgtttgcttttcgtgcatgatattaaatagcttggcagcaacaggactaggatgagtagcagcacgttccttatatgtagctttcgacatgatttatcttcgtttcctgcaggtttttgttctgtgcagttgggttaagaatactgggcaatttcatgtttcttcaacactacatatgcgtatatataccaatctaagtctgtgctccttccttcgttcttccttctgttcggagattaccgaatcaaaaaaatttcaaagaaaccgaaatcaaaaaaaagaataaaaaaaaaatgatgaattgaattgaaaagctagcttatcgatgataagctgtcaaagatgagaattaattccacggactatagactatactagatactccgtctactgtacgatacacttccgctcaggtccttgtcctttaacgaggccttaccactcttttgttactctattgatccagctcagcaaaggcagtgtgatctaagattctatcttcgcgatgtagtaaaactagctagaccgagaaagagactagaaatgcaaaaggcacttctacaatggctgccatcattattatccgatgtgacgctgcagcttctcaatgatattcgaatacgctttgaggagatacagcctaatatccgacaaactgttttacagatttacgatcgtacttgttacccatcattgaattttgaacatccgaacctgggagttttccctgaaacagatagtatatttgaacctgtataataatatatagtctagcgctttacggaagacaatgtatgtatttcggttcctggagaaactattgcatctattgcataggtaatcttgcacgtcgcatccccggttcattttctgcgtttccatcttgcacttcaatagcatatctttgttcgcttgcctgtaacttacacgcgcctcgtatcttttaatgatggaataatttgggaatttactctgtgtttatttatttttatgttttgtatttggattttagaaagtaaataaagaaggtagaagagttacggaatgaagaaaaaaaaataaacaaaggtttaaaaaatttcaacaaaaagcgtactttacatatatatttattagacaagaaaagcagattaaatagatatacattcgattaacgataagtaaaatgtaaaatcacaggattttcgtgtgtggtcttctacacagacaagatgaaacaattcggcattaatacctgagagcaggaagagcaagataaaaggtagtatttgttggcgatccccctagagtcttttacatcttcggaaaacaaaaactattttttctttaatttctttttttactttctatttttaatttatatatttatattaaaaaatttaaattataattatttttatagcacgtgatgaaaaggaccgggaagctccaccccggttgataatcagaaaagccccaaaaacaggaagattgtataagcaaatatttaaattgtaaacgttaatattttgttaaaattcgcgttaaatttttgttaaatcagctcattttttaacgaatagcccgaaatcggcaaaatcccttataaatcaaaagaatagaccgagatagggttgagtgttgttccagtttccaacaagagtccactattaaagaacgtggactccaacgtcaaagggcgaaaaagggtctatcagggcgatggcccactacgtgaaccatcaccctaatcaagttttttggggtcgaggtgccgtaaagcagtaaatcggaagggtaaacggatgcccccatttagagcttgacggggaaagccggcgaacgtggcgagaaaggaagggaagaaagcgaaaggagcgggggctagggcggtgggaagtgtaggggtcacgctgggcgtaaccaccacacccgccgcgcttaatggggcgctacagggcgcgtggggatgatccactagtacggattagaagccgccgagcgggtgacagccctccgaaggaagactctcctccgtgcgtcctcgtcttcaccggtcgcgttcctgaaacgcagatgtgcctcgcgccgcactgctccgaacaataaagattctacaatactagcttttatggttatgaagaggaaaaattggcagtaacctggccccacaaaccttcaaatgaacgaatcaaattaacaaccataggatgataatgcgattagttttttagccttatttctggggtaattaatcagcgaagcgatgatttttgatctattaacagatatataaatgcaaaaactgcataaccactttaactaatactttcaacattttcggtttgtattacttcttattcaaatgtaataaaagtatcaacaaaaaattgttaatatacctctatactttaacgtcaaggagaaaaaaccccggatcggactactagcagctgtaatacgactcactatagggaatattaagcttaaacaatgaggcaggtttggttctcttggattgtgggattgttcctatgttttttcaacgtgtcttctgctgctccagtcaacactacaacagaagatgaaacggcacaaattccggctgaagctgtcatcggttactcagatttagaaggggatttcgatgttgctgttttgccattttccaacagcacaaataacgggttattgtttataaatactactattgccagcattgctgctaaagaagaaggggtatctctcgagaaaagagaggctgaagctatgccaagagaaaacttcttgaagtgcttctcccaatatatcccaaacaacgctactaacttaaagttagtttacactcaaaacaatccattatacatgtctgtcttaaactctactattcataacttaagatttacttccgatactacccctaagccattggttatcgtcaccccatctcacgtctcccatatccaaggtactatcttatgttctaagaaggttggtttgcaaatccgtactagatctggtggtcacgactctgaaggtatgtcctatatctctcaagtcccatttgtcattgttgacttaagaaatatgagatccattaaaattgatgttcattctcaaactgcttgggtcgaagctggtgccaccttgggtgaagtttactactgggtcaacgaaaaaaacgaaaacttatctttagctgccggttactgtccaaccgtctgtgctggtggtcatttcggtggtggtggttacggtccattgatgcgtaactacggtttagctgctgacaacattattgacgctcatttagttaatgttcacggtaaggttttggacagaaaatctatgggtgaagatttattttgggccttgagaggtggtggtgctgaatccttcggtatcatcgttgcctggaagattcgtttagttgctgtcccttctaagtccaccatgttctccgtcaagaaaatcatggaaattcatgagttggtcaaattggttaacaagtggcaaaacatcgcttacaagtatgacaaggatttgttgttaatgactcacttcatcacccgtaatatcaccgacaaccaaggtaagaacaaaactgctattcacacctacttctcctccgtttttttgggtggtgtcgactccttagtcgatttgatgaacaaatcctttccagaattgggtattaagaaaactgattgtagacaattgtcttggattgacaccattatcttctattctggtgtcgttaactacgacaccgacaactttaacaaggaaattttgttggatcgttctgggggtcaaaatggtgccttcaaaatcaaattggactacgtcaaaaagccaatcccagaatctgttttcgttcaactgttggaaaagttgtacgaagaagacattggtgtgggtatgtatgctttgtatccatatggtggtatcatggacgaaatttccgaatctgccatcccattcccacacagagctggtattttatatgaattgtggtacatctgttcttgggaaaagcaagaagacaacgaaaagcatttaaactggattagaaacatttacaacttcatgaccccatacgtttctaagaacccaagattagcctatttgaactaccgtgacttagatattggtattaatgacccaaagaacccaaacaactatactcaagccagaatttggggtgaaaagtacttcggtaagaacttcgatagattagttaaggttaaaactttggtcgatccaaacaacttcttcagaaacgaacaatccatcccaccattgccaagacatcgtcacggccatcatcaccatcaccattagctcgagcatgcatctagagggccgcatcatgtaattagttatgtcacgcttacattcacgccctccccccacatccgctctaaccgaaaaggaaggagttagacaacctgaagtctaggtccctatttatttttttatagttatgttagtattaagaacgttatttatatttcaaatttttcttttttttctgtacagacgcgtgtacgcatgtaacattatactgaaaaccttgcttgagaaggttttgggacgctcgaaggctttaatttgcggccctgcattaatgaatcggccaacgcgcggggagaggcggtttgcgtattgggcgctcttccgcttcctcgctcactgactcgctgcgctcggtcgttcggctgcggcgagcggtatcagctcactcaaaggcggtaatacggttatccacagaatcaggggataacgcaggaaagaacatgtgagcaaaaggccagcaaaagcccaggaaccgtaaaaaggccgcgttgctggcgtttttccataggctccgcccccctgacgagcatcacaaaaatcgacgctcaagtcagaggtggcgaaacccgacaggactataaagataccaggcgtttccccctggaagctccctcgtgcgctctcctgttccgaccctgccgcttaccggatacctgtccgcctttctcccttcgggaagcgtggcgctttctcatagctcacgctgtaggtatctcagttcggtgtaggtcgttcgctccaagctgggctgtgtgcacgaaccccccgttcagcccgaccgctgcgccttatccggtaactatcgtcttgagtccaacccggtaagacacgacttatcgccactggcagcagccactggtaacaggattagcagagcgaggtatgtaggcggtgctacagagttcttgaagtggtggcctaactacggctacactagaagaacagtatttggtatctgcgctctgctgaagccagttaccttcggaaaaagagttggtagctcttgatccggcaaacaaaccaccgctggtagcggtggtttttttgtttgcaagcagcagattacgcgcagaaaaaaaggatctcaagaagatcctttgatcttttctacggggtctgacgctcagtggaacgaaaactcacgttaagggattttggtcatgagattatcaaaaaggatcttcacctagatccttttaaattaaaaatgaagttttaaatcaatctaaagtatatatgagtaaacttggtctgacagttaccaatgcttaatcagtgaggcacctatctcagcgatctgtctatttcgttcatccatagttgcctgactccccgtcgtgtagataactacgatacgggagcgcttaccatctggccccagtgctgcaatgataccgcgagacccacgctcaccggctccagatttatcagcaataaaccagccagccggaagggccgagcgcagaagtggtcctgcaactttatccgcctccattcagtctattaattgttgccgggaagctagagtaagtagttcgccagttaatagtttgcgcaacgttgttggcattgctacaggcatcgtggtgtcactctcgtcgtttggtatggcttcattcagctccggttcccaacgatcaaggcgagttacatgatcccccatgttgtgcaaaaaagcggttagctccttcggtcctccgatcgttgtcagaagtaagttggccgcagtgttatcactcatggttatggcagcactgcataattctcttactgtcatgccatccgtaagatgcttttctgtgactggtgagtactcaaccaagtcattctgagaatagtgtatgcggcgaccgagttgctcttgcccggcgtcaatacgggataatagtgtatcacatagcagaactttaaaagtgctcatcattggaaaacgttcttcggggcgaaaactctcaaggatcttaccgctgttgagatccagttcgatgtaacccactcgtgcacccaactgatcttcagcatcttttactttcaccagcgtttctgggtgagcaaaaacaggaaggcaaaatgccgcaaaaaagggaataagggcgacacggaaatgttgaatactcatactcttcctttttcaatgggtaataactgatataattaaattgaagctctaatttgtgagtttagtatacatgcatttacttataatacagttttttagttttgctggccgcatcttctcaaatatgcttcccagcctgcttttctgtaacgttcaccctctaccttagcatcccttccctttgcaaatagtcctcttccaacaataataatgtcagatcctgtagagaccacatcatccacggttctatactgttgacccaatgcgtctcccttgtcatctaaacccacaccgggtgtcataatcaaccaatcgtaaccttcatctcttccacccatgtctctttgagcaataaagccgataacaaaatctttgtcgctcttcgcaatgtcaacagtacccttagtatattctccagtagatagggagcccttgcatgacaattctgctaacatcaaaaggcctctaggttcctttgttacttcttctgccgcctgcttcaaaccgctaacaatacctgggcccaccacaccgtgtgcattcgtaatgtctgcccattctgctattctgtatacacccgcagagtactgcaatttgactgtattaccaatgtcagcaaattttctgtcttcg

SEQ ID NO: 53 - DNA, 7266 bp, Artificial Sequence
  OXC154-R3T
aagagtaaaaaattgtacttggcggataatgcctttagcggcttaactgtgccctccatggaaaaatcagtcaagatatccacatgtgtttttagtaaacaaattttgggacctaatgcttcaactaactccagtaattccttggtggtacgaacatccaatgaagcacacaagtttgtttgcttttcgtgcatgatattaaatagcttggcagcaacaggactaggatgagtagcagcacgttccttatatgtagctttcgacatgatttatcttcgtttcctgcaggtttttgttctgtgcagttgggttaagaatactgggcaatttcatgtttcttcaacactacatatgcgtatatataccaatctaagtctgtgctccttccttcgttcttccttctgttcggagattaccgaatcaaaaaaatttcaaagaaaccgaaatcaaaaaaaagaataaaaaaaaaatgatgaattgaattgaaaagctagcttatcgatgataagctgtcaaagatgagaattaattccacggactatagactatactagatactccgtctactgtacgatacacttccgctcaggtccttgtcctttaacgaggccttaccactcttttgttactctattgatccagctcagcaaaggcagtgtgatctaagattctatcttcgcgatgtagtaaaactagctagaccgagaaagagactagaaatgcaaaaggcacttctacaatggctgccatcattattatccgatgtgacgctgcagcttctcaatgatattcgaatacgctttgaggagatacagcctaatatccgacaaactgttttacagatttacgatcgtacttgttacccatcattgaattttgaacatccgaacctgggagttttccctgaaacagatagtatatttgaacctgtataataatatatagtctagcgctttacggaagacaatgtatgtatttcggttcctggagaaactattgcatctattgcataggtaatcttgcacgtcgcatccccggttcattttctgcgtttccatcttgcacttcaatagcatatctttgttcgcttgcctgtaacttacacgcgcctcgtatcttttaatgatggaataatttgggaatttactctgtgtttatttatttttatgttttgtatttggattttagaaagtaaataaagaaggtagaagagttacggaatgaagaaaaaaaaataaacaaaggtttaaaaaatttcaacaaaaagcgtactttacatatatatttattagacaagaaaagcagattaaatagatatacattcgattaacgataagtaaaatgtaaaatcacaggattttcgtgtgtggtcttctacacagacaagatgaaacaattcggcattaatacctgagagcaggaagagcaagataaaaggtagtatttgttggcgatccccctagagtcttttacatcttcggaaaacaaaaactattttttctttaatttctttttttactttctatttttaatttatatatttatattaaaaaatttaaattataattatttttatagcacgtgatgaaaaggaccgggaagctccaccccggttgataatcagaaaagccccaaaaacaggaagattgtataagcaaatatttaaattgtaaacgttaatattttgttaaaattcgcgttaaatttttgttaaatcagctcattttttaacgaatagcccgaaatcggcaaaatcccttataaatcaaaagaatagaccgagatagggttgagtgttgttccagtttccaacaagagtccactattaaagaacgtggactccaacgtcaaagggcgaaaaagggtctatcagggcgatggcccactacgtgaaccatcaccctaatcaagttttttggggtcgaggtgccgtaaagcagtaaatcggaagggtaaacggatgcccccatttagagcttgacggggaaagccggcgaacgtggcgagaaaggaagggaagaaagcgaaaggagcgggggctagggcggtgggaagtgtaggggtcacgctgggcgtaaccaccacacccgccgcgcttaatggggcgctacagggcgcgtggggatgatccactagtacggattagaagccgccgagcgggtgacagccctccgaaggaagactctcctccgtgcgtcctcgtcttcaccggtcgcgttcctgaaacgcagatgtgcctcgcgccgcactgctccgaacaataaagattctacaatactagcttttatggttatgaagaggaaaaattggcagtaacctggccccacaaaccttcaaatgaacgaatcaaattaacaaccataggatgataatgcgattagttttttagccttatttctggggtaattaatcagcgaagcgatgatttttgatctattaacagatatataaatgcaaaaactgcataaccactttaactaatactttcaacattttcggtttgtattacttcttattcaaatgtaataaaagtatcaacaaaaaattgttaatatacctctatactttaacgtcaaggagaaaaaaccccggatcggactactagcagctgtaatacgactcactatagggaatattaagcttaaacaatgaggcaggtttggttctcttggattgtgggattgttcctatgttttttcaacgtgtcttctgctgctccagtcaacactacaacagaagatgaaacggcacaaattccggctgaagctgtcatcggttactcagatttagaaggggatttcgatgttgctgttttgccattttccaacagcacaaataacgggttattgtttataaatactactattgccagcattgctgctaaagaagaaggggtatctctcgagaaaagagaggctgaagctatgccaacggaaaacttcttgaagtgcttctcccaatatatcccaaacaacgctactaacttaaagttagtttacactcaaaacaatccattatacatgtctgtcttaaactctactattcataacttaagatttacttccgatactacccctaagccattggttatcgtcaccccatctcacgtctcccatatccaaggtactatcttatgttctaagaaggttggtttgcaaatccgtactagatctggtggtcacgactctgaaggtatgtcctatatctctcaagtcccatttgtcattgttgacttaagaaatatgagatccattaaaattgatgttcattctcaaactgcttgggtcgaagctggtgccaccttgggtgaagtttactactgggtcaacgaaaaaaacgaaaacttatctttagctgccggttactgtccaaccgtctgtgctggtggtcatttcggtggtggtggttacggtccattgatgcgtaactacggtttagctgctgacaacattattgacgctcatttagttaatgttcacggtaaggttttggacagaaaatctatgggtgaagatttattttgggccttgagaggtggtggtgctgaatccttcggtatcatcgttgcctggaagattcgtttagttgctgtcccttctaagtccaccatgttctccgtcaagaaaatcatggaaattcatgagttggtcaaattggttaacaagtggcaaaacatcgcttacaagtatgacaaggatttgttgttaatgactcacttcatcacccgtaatatcaccgacaaccaaggtaagaacaaaactgctattcacacctacttctcctccgtttttttgggtggtgtcgactccttagtcgatttgatgaacaaatcctttccagaattgggtattaagaaaactgattgtagacaattgtcttggattgacaccattatcttctattctggtgtcgttaactacgacaccgacaactttaacaaggaaattttgttggatcgttctgctggtcaaaatggtgccttcaaaatcaaattggactacgtcaaaaagccaatcccagaatctgttttcgttcaaattttggaaaagttgtacgaagaagacattggtgccggtatgtatgctttgtatccatatggtggtatcatggacgaaatttccgaatctgccatcccattcccacacagagctggtattttatatgaattgtggtacatctgttcttgggaaaagcaagaagacaacgaaaagcatttaaactggattagaaacatttacaacttcatgaccccatacgtttctaagaacccaagattagcctatttgaactaccgtgacttagatattggtattaatgacccaaagaacccaaacaactatactcaagccagaatttggggtgaaaagtacttcggtaagaacttcgatagattagttaaggttaaaactttggtcgatccaaacaacttcttcagaaacgaacaatccatcccaccattgccaagacatcgtcacggccatcatcaccatcaccattagctcgagcatgcatctagagggccgcatcatgtaattagttatgtcacgcttacattcacgccctccccccacatccgctctaaccgaaaaggaaggagttagacaacctgaagtctaggtccctatttatttttttatagttatgttagtattaagaacgttatttatatttcaaatttttcttttttttctgtacagacgcgtgtacgcatgtaacattatactgaaaaccttgcttgagaaggttttgggacgctcgaaggctttaatttgcggccctgcattaatgaatcggccaacgcgcggggagaggcggtttgcgtattgggcgctcttccgcttcctcgctcactgactcgctgcgctcggtcgttcggctgcggcgagcggtatcagctcactcaaaggcggtaatacggttatccacagaatcaggggataacgcaggaaagaacatgtgagcaaaaggccagcaaaagcccaggaaccgtaaaaaggccgcgttgctggcgtttttccataggctccgcccccctgacgagcatcacaaaaatcgacgctcaagtcagaggtggcgaaacccgacaggactataaagataccaggcgtttccccctggaagctccctcgtgcgctctcctgttccgaccctgccgcttaccggatacctgtccgcctttctcccttcgggaagcgtggcgctttctcatagctcacgctgtaggtatctcagttcggtgtaggtcgttcgctccaagctgggctgtgtgcacgaaccccccgttcagcccgaccgctgcgccttatccggtaactatcgtcttgagtccaacccggtaagacacgacttatcgccactggcagcagccactggtaacaggattagcagagcgaggtatgtaggcggtgctacagagttcttgaagtggtggcctaactacggctacactagaagaacagtatttggtatctgcgctctgctgaagccagttaccttcggaaaaagagttggtagctcttgatccggcaaacaaaccaccgctggtagcggtggtttttttgtttgcaagcagcagattacgcgcagaaaaaaaggatctcaagaagatcctttgatcttttctacggggtctgacgctcagtggaacgaaaactcacgttaagggattttggtcatgagattatcaaaaaggatcttcacctagatccttttaaattaaaaatgaagttttaaatcaatctaaagtatatatgagtaaacttggtctgacagttaccaatgcttaatcagtgaggcacctatctcagcgatctgtctatttcgttcatccatagttgcctgactccccgtcgtgtagataactacgatacgggagcgcttaccatctggccccagtgctgcaatgataccgcgagacccacgctcaccggctccagatttatcagcaataaaccagccagccggaagggccgagcgcagaagtggtcctgcaactttatccgcctccattcagtctattaattgttgccgggaagctagagtaagtagttcgccagttaatagtttgcgcaacgttgttggcattgctacaggcatcgtggtgtcactctcgtcgtttggtatggcttcattcagctccggttcccaacgatcaaggcgagttacatgatcccccatgttgtgcaaaaaagcggttagctccttcggtcctccgatcgttgtcagaagtaagttggccgcagtgttatcactcatggttatggcagcactgcataattctcttactgtcatgccatccgtaagatgcttttctgtgactggtgagtactcaaccaagtcattctgagaatagtgtatgcggcgaccgagttgctcttgcccggcgtcaatacgggataatagtgtatcacatagcagaactttaaaagtgctcatcattggaaaacgttcttcggggcgaaaactctcaaggatcttaccgctgttgagatccagttcgatgtaacccactcgtgcacccaactgatcttcagcatcttttactttcaccagcgtttctgggtgagcaaaaacaggaaggcaaaatgccgcaaaaaagggaataagggcgacacggaaatgttgaatactcatactcttcctttttcaatgggtaataactgatataattaaattgaagctctaatttgtgagtttagtatacatgcatttacttataatacagttttttagttttgctggccgcatcttctcaaatatgcttcccagcctgcttttctgtaacgttcaccctctaccttagcatcccttccctttgcaaatagtcctcttccaacaataataatgtcagatcctgtagagaccacatcatccacggttctatactgttgacccaatgcgtctcccttgtcatctaaacccacaccgggtgtcataatcaaccaatcgtaaccttcatctcttccacccatgtctctttgagcaataaagccgataacaaaatctttgtcgctcttcgcaatgtcaacagtacccttagtatattctccagtagatagggagcccttgcatgacaattctgctaacatcaaaaggcctctaggttcctttgttacttcttctgccgcctgcttcaaaccgctaacaatacctgggcccaccacaccgtgtgcattcgtaatgtctgcccattctgctattctgtatacacccgcagagtactgcaatttgactgtattaccaatgtcagcaaattttctgtcttcg

SEQ ID NO: 54 - DNA, 7266 bp, Artificial Sequence
  OXC154-R3V/A18E/T49R/V97E
aagagtaaaaaattgtacttggcggataatgcctttagcggcttaactgtgccctccatggaaaaatcagtcaagatatccacatgtgtttttagtaaacaaattttgggacctaatgcttcaactaactccagtaattccttggtggtacgaacatccaatgaagcacacaagtttgtttgcttttcgtgcatgatattaaatagcttggcagcaacaggactaggatgagtagcagcacgttccttatatgtagctttcgacatgatttatcttcgtttcctgcaggtttttgttctgtgcagttgggttaagaatactgggcaatttcatgtttcttcaacactacatatgcgtatatataccaatctaagtctgtgctccttccttcgttcttccttctgttcggagattaccgaatcaaaaaaatttcaaagaaaccgaaatcaaaaaaaagaataaaaaaaaaatgatgaattgaattgaaaagctagcttatcgatgataagctgtcaaagatgagaattaattccacggactatagactatactagatactccgtctactgtacgatacacttccgctcaggtccttgtcctttaacgaggccttaccactcttttgttactctattgatccagctcagcaaaggcagtgtgatctaagattctatcttcgcgatgtagtaaaactagctagaccgagaaagagactagaaatgcaaaaggcacttctacaatggctgccatcattattatccgatgtgacgctgcagcttctcaatgatattcgaatacgctttgaggagatacagcctaatatccgacaaactgttttacagatttacgatcgtacttgttacccatcattgaattttgaacatccgaacctgggagttttccctgaaacagatagtatatttgaacctgtataataatatatagtctagcgctttacggaagacaatgtatgtatttcggttcctggagaaactattgcatctattgcataggtaatcttgcacgtcgcatccccggttcattttctgcgtttccatcttgcacttcaatagcatatctttgttcgcttgcctgtaacttacacgcgcctcgtatcttttaatgatggaataatttgggaatttactctgtgtttatttatttttatgttttgtatttggattttagaaagtaaataaagaaggtagaagagttacggaatgaagaaaaaaaaataaacaaaggtttaaaaaatttcaacaaaaagcgtactttacatatatatttattagacaagaaaagcagattaaatagatatacattcgattaacgataagtaaaatgtaaaatcacaggattttcgtgtgtggtcttctacacagacaagatgaaacaattcggcattaatacctgagagcaggaagagcaagataaaaggtagtatttgttggcgatccccctagagtcttttacatcttcggaaaacaaaaactattttttctttaatttctttttttactttctatttttaatttatatatttatattaaaaaatttaaattataattatttttatagcacgtgatgaaaaggaccgggaagctccaccccggttgataatcagaaaagccccaaaaacaggaagattgtataagcaaatatttaaattgtaaacgttaatattttgttaaaattcgcgttaaatttttgttaaatcagctcattttttaacgaatagcccgaaatcggcaaaatcccttataaatcaaaagaatagaccgagatagggttgagtgttgttccagtttccaacaagagtccactattaaagaacgtggactccaacgtcaaagggcgaaaaagggtctatcagggcgatggcccactacgtgaaccatcaccctaatcaagttttttggggtcgaggtgccgtaaagcagtaaatcggaagggtaaacggatgcccccatttagagcttgacggggaaagccggcgaacgtggcgagaaaggaagggaagaaagcgaaaggagcgggggctagggcggtgggaagtgtaggggtcacgctgggcgtaaccaccacacccgccgcgcttaatggggcgctacagggcgcgtggggatgatccactagtacggattagaagccgccgagcgggtgacagccctccgaaggaagactctcctccgtgcgtcctcgtcttcaccggtcgcgttcctgaaacgcagatgtgcctcgcgccgcactgctccgaacaataaagattctacaatactagcttttatggttatgaagaggaaaaattggcagtaacctggccccacaaaccttcaaatgaacgaatcaaattaacaaccataggatgataatgcgattagttttttagccttatttctggggtaattaatcagcgaagcgatgatttttgatctattaacagatatataaatgcaaaaactgcataaccactttaactaatactttcaacattttcggtttgtattacttcttattcaaatgtaataaaagtatcaacaaaaaattgttaatatacctctatactttaacgtcaaggagaaaaaaccccggatcggactactagcagctgtaatacgactcactatagggaatattaagcttaaacaatgaggcaggtttggttctcttggattgtgggattgttcctatgttttttcaacgtgtcttctgctgctccagtcaacactacaacagaagatgaaacggcacaaattccggctgaagctgtcatcggttactcagatttagaaggggatttcgatgttgctgttttgccattttccaacagcacaaataacgggttattgtttataaatactactattgccagcattgctgctaaagaagaaggggtatctctcgagaaaagagaggctgaagctatgccagtcgaaaacttcttgaagtgcttctcccaatatatcccaaacaacgagactaacttaaagttagtttacactcaaaacaatccattatacatgtctgtcttaaactctactattcataacttaagatttacttccgatcggacccctaagccattggttatcgtcaccccatctcacgtctcccatatccaaggtactatcttatgttctaagaaggttggtttgcaaatccgtactagatctggtggtcacgactctgaaggtatgtcctatatctctcaagagccatttgtcattgttgacttaagaaatatgagatccattaaaattgatgttcattctcaaactgcttgggtcgaagctggtgccaccttgggtgaagtttactactgggtcaacgaaaaaaacgaaaacttatctttagctgccggttactgtccaaccgtctgtgctggtggtcatttcggtggtggtggttacggtccattgatgcgtaactacggtttagctgctgacaacattattgacgctcatttagttaatgttcacggtaaggttttggacagaaaatctatgggtgaagatttattttgggccttgagaggtggtggtgctgaatccttcggtatcatcgttgcctggaagattcgtttagttgctgtcccttctaagtccaccatgttctccgtcaagaaaatcatggaaattcatgagttggtcaaattggttaacaagtggcaaaacatcgcttacaagtatgacaaggatttgttgttaatgactcacttcatcacccgtaatatcaccgacaaccaaggtaagaacaaaactgctattcacacctacttctcctccgtttttttgggtggtgtcgactccttagtcgatttgatgaacaaatcctttccagaattgggtattaagaaaactgattgtagacaattgtcttggattgacaccattatcttctattctggtgtcgttaactacgacaccgacaactttaacaaggaaattttgttggatcgttctgctggtcaaaatggtgccttcaaaatcaaattggactacgtcaaaaagccaatcccagaatctgttttcgttcaaattttggaaaagttgtacgaagaagacattggtgccggtatgtatgctttgtatccatatggtggtatcatggacgaaatttccgaatctgccatcccattcccacacagagctggtattttatatgaattgtggtacatctgttcttgggaaaagcaagaagacaacgaaaagcatttaaactggattagaaacatttacaacttcatgaccccatacgtttctaagaacccaagattagcctatttgaactaccgtgacttagatattggtattaatgacccaaagaacccaaacaactatactcaagccagaatttggggtgaaaagtacttcggtaagaacttcgatagattagttaaggttaaaactttggtcgatccaaacaacttcttcagaaacgaacaatccatcccaccattgccaagacatcgtcacggccatcatcaccatcaccattagctcgagcatgcatctagagggccgcatcatgtaattagttatgtcacgcttacattcacgccctccccccacatccgctctaaccgaaaaggaaggagttagacaacctgaagtctaggtccctatttatttttttatagttatgttagtattaagaacgttatttatatttcaaatttttcttttttttctgtacagacgcgtgtacgcatgtaacattatactgaaaaccttgcttgagaaggttttgggacgctcgaaggctttaatttgcggccctgcattaatgaatcggccaacgcgcggggagaggcggtttgcgtattgggcgctcttccgcttcctcgctcactgactcgctgcgctcggtcgttcggctgcggcgagcggtatcagctcactcaaaggcggtaatacggttatccacagaatcaggggataacgcaggaaagaacatgtgagcaaaaggccagcaaaagcccaggaaccgtaaaaaggccgcgttgctggcgtttttccataggctccgcccccctgacgagcatcacaaaaatcgacgctcaagtcagaggtggcgaaacccgacaggactataaagataccaggcgtttccccctggaagctccctcgtgcgctctcctgttccgaccctgccgcttaccggatacctgtccgcctttctcccttcgggaagcgtggcgctttctcatagctcacgctgtaggtatctcagttcggtgtaggtcgttcgctccaagctgggctgtgtgcacgaaccccccgttcagcccgaccgctgcgccttatccggtaactatcgtcttgagtccaacccggtaagacacgacttatcgccactggcagcagccactggtaacaggattagcagagcgaggtatgtaggcggtgctacagagttcttgaagtggtggcctaactacggctacactagaagaacagtatttggtatctgcgctctgctgaagccagttaccttcggaaaaagagttggtagctcttgatccggcaaacaaaccaccgctggtagcggtggtttttttgtttgcaagcagcagattacgcgcagaaaaaaaggatctcaagaagatcctttgatcttttctacggggtctgacgctcagtggaacgaaaactcacgttaagggattttggtcatgagattatcaaaaaggatcttcacctagatccttttaaattaaaaatgaagttttaaatcaatctaaagtatatatgagtaaacttggtctgacagttaccaatgcttaatcagtgaggcacctatctcagcgatctgtctatttcgttcatccatagttgcctgactccccgtcgtgtagataactacgatacgggagcgcttaccatctggccccagtgctgcaatgataccgcgagacccacgctcaccggctccagatttatcagcaataaaccagccagccggaagggccgagcgcagaagtggtcctgcaactttatccgcctccattcagtctattaattgttgccgggaagctagagtaagtagttcgccagttaatagtttgcgcaacgttgttggcattgctacaggcatcgtggtgtcactctcgtcgtttggtatggcttcattcagctccggttcccaacgatcaaggcgagttacatgatcccccatgttgtgcaaaaaagcggttagctccttcggtcctccgatcgttgtcagaagtaagttggccgcagtgttatcactcatggttatggcagcactgcataattctcttactgtcatgccatccgtaagatgcttttctgtgactggtgagtactcaaccaagtcattctgagaatagtgtatgcggcgaccgagttgctcttgcccggcgtcaatacgggataatagtgtatcacatagcagaactttaaaagtgctcatcattggaaaacgttcttcggggcgaaaactctcaaggatcttaccgctgttgagatccagttcgatgtaacccactcgtgcacccaactgatcttcagcatcttttactttcaccagcgtttctgggtgagcaaaaacaggaaggcaaaatgccgcaaaaaagggaataagggcgacacggaaatgttgaatactcatactcttcctttttcaatgggtaataactgatataattaaattgaagctctaatttgtgagtttagtatacatgcatttacttataatacagttttttagttttgctggccgcatcttctcaaatatgcttcccagcctgcttttctgtaacgttcaccctctaccttagcatcccttccctttgcaaatagtcctcttccaacaataataatgtcagatcctgtagagaccacatcatccacggttctatactgttgacccaatgcgtctcccttgtcatctaaacccacaccgggtgtcataatcaaccaatcgtaaccttcatctcttccacccatgtctctttgagcaataaagccgataacaaaatctttgtcgctcttcgcaatgtcaacagtacccttagtatattctccagtagatagggagcccttgcatgacaattctgctaacatcaaaaggcctctaggttcctttgttacttcttctgccgcctgcttcaaaccgctaacaatacctgggcccaccacaccgtgtgcattcgtaatgtctgcccattctgctattctgtatacacccgcagagtactgcaatttgactgtattaccaatgtcagcaaattttctgtcttcg

SEQ ID NO: 55 - DNA, 7266 bp, Artificial Sequence
  OXC154-R3T/L21G/T49R/S60T/S88A(=GCT)
aagagtaaaaaattgtacttggcggataatgcctttagcggcttaactgtgccctccatggaaaaatcagtcaagatatccacatgtgtttttagtaaacaaattttgggacctaatgcttcaactaactccagtaattccttggtggtacgaacatccaatgaagcacacaagtttgtttgcttttcgtgcatgatattaaatagcttggcagcaacaggactaggatgagtagcagcacgttccttatatgtagctttcgacatgatttatcttcgtttcctgcaggtttttgttctgtgcagttgggttaagaatactgggcaatttcatgtttcttcaacactacatatgcgtatatataccaatctaagtctgtgctccttccttcgttcttccttctgttcggagattaccgaatcaaaaaaatttcaaagaaaccgaaatcaaaaaaaagaataaaaaaaaaatgatgaattgaattgaaaagctagcttatcgatgataagctgtcaaagatgagaattaattccacggactatagactatactagatactccgtctactgtacgatacacttccgctcaggtccttgtcctttaacgaggccttaccactcttttgttactctattgatccagctcagcaaaggcagtgtgatctaagattctatcttcgcgatgtagtaaaactagctagaccgagaaagagactagaaatgcaaaaggcacttctacaatggctgccatcattattatccgatgtgacgctgcagcttctcaatgatattcgaatacgctttgaggagatacagcctaatatccgacaaactgttttacagatttacgatcgtacttgttacccatcattgaattttgaacatccgaacctgggagttttccctgaaacagatagtatatttgaacctgtataataatatatagtctagcgctttacggaagacaatgtatgtatttcggttcctggagaaactattgcatctattgcataggtaatcttgcacgtcgcatccccggttcattttctgcgtttccatcttgcacttcaatagcatatctttgttcgcttgcctgtaacttacacgcgcctcgtatcttttaatgatggaataatttgggaatttactctgtgtttatttatttttatgttttgtatttggattttagaaagtaaataaagaaggtagaagagttacggaatgaagaaaaaaaaataaacaaaggtttaaaaaatttcaacaaaaagcgtactttacatatatatttattagacaagaaaagcagattaaatagatatacattcgattaacgataagtaaaatgtaaaatcacaggattttcgtgtgtggtcttctacacagacaagatgaaacaattcggcattaatacctgagagcaggaagagcaagataaaaggtagtatttgttggcgatccccctagagtcttttacatcttcggaaaacaaaaactattttttctttaatttctttttttactttctatttttaatttatatatttatattaaaaaatttaaattataattatttttatagcacgtgatgaaaaggaccgggaagctccaccccggttgataatcagaaaagccccaaaaacaggaagattgtataagcaaatatttaaattgtaaacgttaatattttgttaaaattcgcgttaaatttttgttaaatcagctcattttttaacgaatagcccgaaatcggcaaaatcccttataaatcaaaagaatagaccgagatagggttgagtgttgttccagtttccaacaagagtccactattaaagaacgtggactccaacgtcaaagggcgaaaaagggtctatcagggcgatggcccactacgtgaaccatcaccctaatcaagttttttggggtcgaggtgccgtaaagcagtaaatcggaagggtaaacggatgcccccatttagagcttgacggggaaagccggcgaacgtggcgagaaaggaagggaagaaagcgaaaggagcgggggctagggcggtgggaagtgtaggggtcacgctgggcgtaaccaccacacccgccgcgcttaatggggcgctacagggcgcgtggggatgatccactagtacggattagaagccgccgagcgggtgacagccctccgaaggaagactctcctccgtgcgtcctcgtcttcaccggtcgcgttcctgaaacgcagatgtgcctcgcgccgcactgctccgaacaataaagattctacaatactagcttttatggttatgaagaggaaaaattggcagtaacctggccccacaaaccttcaaatgaacgaatcaaattaacaaccataggatgataatgcgattagttttttagccttatttctggggtaattaatcagcgaagcgatgatttttgatctattaacagatatataaatgcaaaaactgcataaccactttaactaatactttcaacattttcggtttgtattacttcttattcaaatgtaataaaagtatcaacaaaaaattgttaatatacctctatactttaacgtcaaggagaaaaaaccccggatcggactactagcagctgtaatacgactcactatagggaatattaagcttaaacaatgaggcaggtttggttctcttggattgtgggattgttcctatgttttttcaacgtgtcttctgctgctccagtcaacactacaacagaagatgaaacggcacaaattccggctgaagctgtcatcggttactcagatttagaaggggatttcgatgttgctgttttgccattttccaacagcacaaataacgggttattgtttataaatactactattgccagcattgctgctaaagaagaaggggtatctctcgagaaaagagaggctgaagctatgccaacggaaaacttcttgaagtgcttctcccaatatatcccaaacaacgctactaacgggaagttagtttacactcaaaacaatccattatacatgtctgtcttaaactctactattcataacttaagatttacttccgatcggacccctaagccattggttatcgtcaccccaacgcacgtctcccatatccaaggtactatcttatgttctaagaaggttggtttgcaaatccgtactagatctggtggtcacgacgctgaaggtatgtcctatatctctcaagtcccatttgtcattgttgacttaagaaatatgagatccattaaaattgatgttcattctcaaactgcttgggtcgaagctggtgccaccttgggtgaagtttactactgggtcaacgaaaaaaacgaaaacttatctttagctgccggttactgtccaaccgtctgtgctggtggtcatttcggtggtggtggttacggtccattgatgcgtaactacggtttagctgctgacaacattattgacgctcatttagttaatgttcacggtaaggttttggacagaaaatctatgggtgaagatttattttgggccttgagaggtggtggtgctgaatccttcggtatcatcgttgcctggaagattcgtttagttgctgtcccttctaagtccaccatgttctccgtcaagaaaatcatggaaattcatgagttggtcaaattggttaacaagtggcaaaacatcgcttacaagtatgacaaggatttgttgttaatgactcacttcatcacccgtaatatcaccgacaaccaaggtaagaacaaaactgctattcacacctacttctcctccgtttttttgggtggtgtcgactccttagtcgatttgatgaacaaatcctttccagaattgggtattaagaaaactgattgtagacaattgtcttggattgacaccattatcttctattctggtgtcgttaactacgacaccgacaactttaacaaggaaattttgttggatcgttctgctggtcaaaatggtgccttcaaaatcaaattggactacgtcaaaaagccaatcccagaatctgttttcgttcaaattttggaaaagttgtacgaagaagacattggtgccggtatgtatgctttgtatccatatggtggtatcatggacgaaatttccgaatctgccatcccattcccacacagagctggtattttatatgaattgtggtacatctgttcttgggaaaagcaagaagacaacgaaaagcatttaaactggattagaaacatttacaacttcatgaccccatacgtttctaagaacccaagattagcctatttgaactaccgtgacttagatattggtattaatgacccaaagaacccaaacaactatactcaagccagaatttggggtgaaaagtacttcggtaagaacttcgatagattagttaaggttaaaactttggtcgatccaaacaacttcttcagaaacgaacaatccatcccaccattgccaagacatcgtcacggccatcatcaccatcaccattagctcgagcatgcatctagagggccgcatcatgtaattagttatgtcacgcttacattcacgccctccccccacatccgctctaaccgaaaaggaaggagttagacaacctgaagtctaggtccctatttatttttttatagttatgttagtattaagaacgttatttatatttcaaatttttcttttttttctgtacagacgcgtgtacgcatgtaacattatactgaaaaccttgcttgagaaggttttgggacgctcgaaggctttaatttgcggccctgcattaatgaatcggccaacgcgcggggagaggcggtttgcgtattgggcgctcttccgcttcctcgctcactgactcgctgcgctcggtcgttcggctgcggcgagcggtatcagctcactcaaaggcggtaatacggttatccacagaatcaggggataacgcaggaaagaacatgtgagcaaaaggccagcaaaagcccaggaaccgtaaaaaggccgcgttgctggcgtttttccataggctccgcccccctgacgagcatcacaaaaatcgacgctcaagtcagaggtggcgaaacccgacaggactataaagataccaggcgtttccccctggaagctccctcgtgcgctctcctgttccgaccctgccgcttaccggatacctgtccgcctttctcccttcgggaagcgtggcgctttctcatagctcacgctgtaggtatctcagttcggtgtaggtcgttcgctccaagctgggctgtgtgcacgaaccccccgttcagcccgaccgctgcgccttatccggtaactatcgtcttgagtccaacccggtaagacacgacttatcgccactggcagcagccactggtaacaggattagcagagcgaggtatgtaggcggtgctacagagttcttgaagtggtggcctaactacggctacactagaagaacagtatttggtatctgcgctctgctgaagccagttaccttcggaaaaagagttggtagctcttgatccggcaaacaaaccaccgctggtagcggtggtttttttgtttgcaagcagcagattacgcgcagaaaaaaaggatctcaagaagatcctttgatcttttctacggggtctgacgctcagtggaacgaaaactcacgttaagggattttggtcatgagattatcaaaaaggatcttcacctagatccttttaaattaaaaatgaagttttaaatcaatctaaagtatatatgagtaaacttggtctgacagttaccaatgcttaatcagtgaggcacctatctcagcgatctgtctatttcgttcatccatagttgcctgactccccgtcgtgtagataactacgatacgggagcgcttaccatctggccccagtgctgcaatgataccgcgagacccacgctcaccggctccagatttatcagcaataaaccagccagccggaagggccgagcgcagaagtggtcctgcaactttatccgcctccattcagtctattaattgttgccgggaagctagagtaagtagttcgccagttaatagtttgcgcaacgttgttggcattgctacaggcatcgtggtgtcactctcgtcgtttggtatggcttcattcagctccggttcccaacgatcaaggcgagttacatgatcccccatgttgtgcaaaaaagcggttagctccttcggtcctccgatcgttgtcagaagtaagttggccgcagtgttatcactcatggttatggcagcactgcataattctcttactgtcatgccatccgtaagatgcttttctgtgactggtgagtactcaaccaagtcattctgagaatagtgtatgcggcgaccgagttgctcttgcccggcgtcaatacgggataatagtgtatcacatagcagaactttaaaagtgctcatcattggaaaacgttcttcggggcgaaaactctcaaggatcttaccgctgttgagatccagttcgatgtaacccactcgtgcacccaactgatcttcagcatcttttactttcaccagcgtttctgggtgagcaaaaacaggaaggcaaaatgccgcaaaaaagggaataagggcgacacggaaatgttgaatactcatactcttcctttttcaatgggtaataactgatataattaaattgaagctctaatttgtgagtttagtatacatgcatttacttataatacagttttttagttttgctggccgcatcttctcaaatatgcttcccagcctgcttttctgtaacgttcaccctctaccttagcatcccttccctttgcaaatagtcctcttccaacaataataatgtcagatcctgtagagaccacatcatccacggttctatactgttgacccaatgcgtctcccttgtcatctaaacccacaccgggtgtcataatcaaccaatcgtaaccttcatctcttccacccatgtctctttgagcaataaagccgataacaaaatctttgtcgctcttcgcaatgtcaacagtacccttagtatattctccagtagatagggagcccttgcatgacaattctgctaacatcaaaaggcctctaggttcctttgttacttcttctgccgcctgcttcaaaccgctaacaatacctgggcccaccacaccgtgtgcattcgtaatgtctgcccattctgctattctgtatacacccgcagagtactgcaatttgactgtattaccaatgtcagcaaattttctgtcttcg

SEQ ID NO: 56 - DNA, 7266 bp, Artificial Sequence
  OXC154-R3T/L21G/T49R/V97E
aagagtaaaaaattgtacttggcggataatgcctttagcggcttaactgtgccctccatggaaaaatcagtcaagatatccacatgtgtttttagtaaacaaattttgggacctaatgcttcaactaactccagtaattccttggtggtacgaacatccaatgaagcacacaagtttgtttgcttttcgtgcatgatattaaatagcttggcagcaacaggactaggatgagtagcagcacgttccttatatgtagctttcgacatgatttatcttcgtttcctgcaggtttttgttctgtgcagttgggttaagaatactgggcaatttcatgtttcttcaacactacatatgcgtatatataccaatctaagtctgtgctccttccttcgttcttccttctgttcggagattaccgaatcaaaaaaatttcaaagaaaccgaaatcaaaaaaaagaataaaaaaaaaatgatgaattgaattgaaaagctagcttatcgatgataagctgtcaaagatgagaattaattccacggactatagactatactagatactccgtctactgtacgatacacttccgctcaggtccttgtcctttaacgaggccttaccactcttttgttactctattgatccagctcagcaaaggcagtgtgatctaagattctatcttcgcgatgtagtaaaactagctagaccgagaaagagactagaaatgcaaaaggcacttctacaatggctgccatcattattatccgatgtgacgctgcagcttctcaatgatattcgaatacgctttgaggagatacagcctaatatccgacaaactgttttacagatttacgatcgtacttgttacccatcattgaattttgaacatccgaacctgggagttttccctgaaacagatagtatatttgaacctgtataataatatatagtctagcgctttacggaagacaatgtatgtatttcggttcctggagaaactattgcatctattgcataggtaatcttgcacgtcgcatccccggttcattttctgcgtttccatcttgcacttcaatagcatatctttgttcgcttgcctgtaacttacacgcgcctcgtatcttttaatgatggaataatttgggaatttactctgtgtttatttatttttatgttttgtatttggattttagaaagtaaataaagaaggtagaagagttacggaatgaagaaaaaaaaataaacaaaggtttaaaaaatttcaacaaaaagcgtactttacatatatatttattagacaagaaaagcagattaaatagatatacattcgattaacgataagtaaaatgtaaaatcacaggattttcgtgtgtggtcttctacacagacaagatgaaacaattcggcattaatacctgagagcaggaagagcaagataaaaggtagtatttgttggcgatccccctagagtcttttacatcttcggaaaacaaaaactattttttctttaatttctttttttactttctatttttaatttatatatttatattaaaaaatttaaattataattatttttatagcacgtgatgaaaaggaccgggaagctccaccccggttgataatcagaaaagccccaaaaacaggaagattgtataagcaaatatttaaattgtaaacgttaatattttgttaaaattcgcgttaaatttttgttaaatcagctcattttttaacgaatagcccgaaatcggcaaaatcccttataaatcaaaagaatagaccgagatagggttgagtgttgttccagtttccaacaagagtccactattaaagaacgtggactccaacgtcaaagggcgaaaaagggtctatcagggcgatggcccactacgtgaaccatcaccctaatcaagttttttggggtcgaggtgccgtaaagcagtaaatcggaagggtaaacggatgcccccatttagagcttgacggggaaagccggcgaacgtggcgagaaaggaagggaagaaagcgaaaggagcgggggctagggcggtgggaagtgtaggggtcacgctgggcgtaaccaccacacccgccgcgcttaatggggcgctacagggcgcgtggggatgatccactagtacggattagaagccgccgagcgggtgacagccctccgaaggaagactctcctccgtgcgtcctcgtcttcaccggtcgcgttcctgaaacgcagatgtgcctcgcgccgcactgctccgaacaataaagattctacaatactagcttttatggttatgaagaggaaaaattggcagtaacctggccccacaaaccttcaaatgaacgaatcaaattaacaaccataggatgataatgcgattagttttttagccttatttctggggtaattaatcagcgaagcgatgatttttgatctattaacagatatataaatgcaaaaactgcataaccactttaactaatactttcaacattttcggtttgtattacttcttattcaaatgtaataaaagtatcaacaaaaaattgttaatatacctctatactttaacgtcaaggagaaaaaaccccggatcggactactagcagctgtaatacgactcactatagggaatattaagcttaaacaatgaggcaggtttggttctcttggattgtgggattgttcctatgttttttcaacgtgtcttctgctgctccagtcaacactacaacagaagatgaaacggcacaaattccggctgaagctgtcatcggttactcagatttagaaggggatttcgatgttgctgttttgccattttccaacagcacaaataacgggttattgtttataaatactactattgccagcattgctgctaaagaagaaggggtatctctcgagaaaagagaggctgaagctatgccaacggaaaacttcttgaagtgcttctcccaatatatcccaaacaacgctactaacgggaagttagtttacactcaaaacaatccattatacatgtctgtcttaaactctactattcataacttaagatttacttccgatcggacccctaagccattggttatcgtcaccccatctcacgtctcccatatccaaggtactatcttatgttctaagaaggttggtttgcaaatccgtactagatctggtggtcacgactctgaaggtatgtcctatatctctcaagagccatttgtcattgttgacttaagaaatatgagatccattaaaattgatgttcattctcaaactgcttgggtcgaagctggtgccaccttgggtgaagtttactactgggtcaacgaaaaaaacgaaaacttatctttagctgccggttactgtccaaccgtctgtgctggtggtcatttcggtggtggtggttacggtccattgatgcgtaactacggtttagctgctgacaacattattgacgctcatttagttaatgttcacggtaaggttttggacagaaaatctatgggtgaagatttattttgggccttgagaggtggtggtgctgaatccttcggtatcatcgttgcctggaagattcgtttagttgctgtcccttctaagtccaccatgttctccgtcaagaaaatcatggaaattcatgagttggtcaaattggttaacaagtggcaaaacatcgcttacaagtatgacaaggatttgttgttaatgactcacttcatcacccgtaatatcaccgacaaccaaggtaagaacaaaactgctattcacacctacttctcctccgtttttttgggtggtgtcgactccttagtcgatttgatgaacaaatcctttccagaattgggtattaagaaaactgattgtagacaattgtcttggattgacaccattatcttctattctggtgtcgttaactacgacaccgacaactttaacaaggaaattttgttggatcgttctgctggtcaaaatggtgccttcaaaatcaaattggactacgtcaaaaagccaatcccagaatctgttttcgttcaaattttggaaaagttgtacgaagaagacattggtgccggtatgtatgctttgtatccatatggtggtatcatggacgaaatttccgaatctgccatcccattcccacacagagctggtattttatatgaattgtggtacatctgttcttgggaaaagcaagaagacaacgaaaagcatttaaactggattagaaacatttacaacttcatgaccccatacgtttctaagaacccaagattagcctatttgaactaccgtgacttagatattggtattaatgacccaaagaacccaaacaactatactcaagccagaatttggggtgaaaagtacttcggtaagaacttcgatagattagttaaggttaaaactttggtcgatccaaacaacttcttcagaaacgaacaatccatcccaccattgccaagacatcgtcacggccatcatcaccatcaccattagctcgagcatgcatctagagggccgcatcatgtaattagttatgtcacgcttacattcacgccctccccccacatccgctctaaccgaaaaggaaggagttagacaacctgaagtctaggtccctatttatttttttatagttatgttagtattaagaacgttatttatatttcaaatttttcttttttttctgtacagacgcgtgtacgcatgtaacattatactgaaaaccttgcttgagaaggttttgggacgctcgaaggctttaatttgcggccctgcattaatgaatcggccaacgcgcggggagaggcggtttgcgtattgggcgctcttccgcttcctcgctcactgactcgctgcgctcggtcgttcggctgcggcgagcggtatcagctcactcaaaggcggtaatacggttatccacagaatcaggggataacgcaggaaagaacatgtgagcaaaaggccagcaaaagcccaggaaccgtaaaaaggccgcgttgctggcgtttttccataggctccgcccccctgacgagcatcacaaaaatcgacgctcaagtcagaggtggcgaaacccgacaggactataaagataccaggcgtttccccctggaagctccctcgtgcgctctcctgttccgaccctgccgcttaccggatacctgtccgcctttctcccttcgggaagcgtggcgctttctcatagctcacgctgtaggtatctcagttcggtgtaggtcgttcgctccaagctgggctgtgtgcacgaaccccccgttcagcccgaccgctgcgccttatccggtaactatcgtcttgagtccaacccggtaagacacgacttatcgccactggcagcagccactggtaacaggattagcagagcgaggtatgtaggcggtgctacagagttcttgaagtggtggcctaactacggctacactagaagaacagtatttggtatctgcgctctgctgaagccagttaccttcggaaaaagagttggtagctcttgatccggcaaacaaaccaccgctggtagcggtggtttttttgtttgcaagcagcagattacgcgcagaaaaaaaggatctcaagaagatcctttgatcttttctacggggtctgacgctcagtggaacgaaaactcacgttaagggattttggtcatgagattatcaaaaaggatcttcacctagatccttttaaattaaaaatgaagttttaaatcaatctaaagtatatatgagtaaacttggtctgacagttaccaatgcttaatcagtgaggcacctatctcagcgatctgtctatttcgttcatccatagttgcctgactccccgtcgtgtagataactacgatacgggagcgcttaccatctggccccagtgctgcaatgataccgcgagacccacgctcaccggctccagatttatcagcaataaaccagccagccggaagggccgagcgcagaagtggtcctgcaactttatccgcctccattcagtctattaattgttgccgggaagctagagtaagtagttcgccagttaatagtttgcgcaacgttgttggcattgctacaggcatcgtggtgtcactctcgtcgtttggtatggcttcattcagctccggttcccaacgatcaaggcgagttacatgatcccccatgttgtgcaaaaaagcggttagctccttcggtcctccgatcgttgtcagaagtaagttggccgcagtgttatcactcatggttatggcagcactgcataattctcttactgtcatgccatccgtaagatgcttttctgtgactggtgagtactcaaccaagtcattctgagaatagtgtatgcggcgaccgagttgctcttgcccggcgtcaatacgggataatagtgtatcacatagcagaactttaaaagtgctcatcattggaaaacgttcttcggggcgaaaactctcaaggatcttaccgctgttgagatccagttcgatgtaacccactcgtgcacccaactgatcttcagcatcttttactttcaccagcgtttctgggtgagcaaaaacaggaaggcaaaatgccgcaaaaaagggaataagggcgacacggaaatgttgaatactcatactcttcctttttcaatgggtaataactgatataattaaattgaagctctaatttgtgagtttagtatacatgcatttacttataatacagttttttagttttgctggccgcatcttctcaaatatgcttcccagcctgcttttctgtaacgttcaccctctaccttagcatcccttccctttgcaaatagtcctcttccaacaataataatgtcagatcctgtagagaccacatcatccacggttctatactgttgacccaatgcgtctcccttgtcatctaaacccacaccgggtgtcataatcaaccaatcgtaaccttcatctcttccacccatgtctctttgagcaataaagccgataacaaaatctttgtcgctcttcgcaatgtcaacagtacccttagtatattctccagtagatagggagcccttgcatgacaattctgctaacatcaaaaggcctctaggttcctttgttacttcttctgccgcctgcttcaaaccgctaacaatacctgggcccaccacaccgtgtgcattcgtaatgtctgcccattctgctattctgtatacacccgcagagtactgcaatttgactgtattaccaatgtcagcaaattttctgtcttcg

SEQ ID NO: 57 - DNA, 7266 bp, Artificial Sequence
  OXC154-R3V/L21G/T49R/S60T
aagagtaaaaaattgtacttggcggataatgcctttagcggcttaactgtgccctccatggaaaaatcagtcaagatatccacatgtgtttttagtaaacaaattttgggacctaatgcttcaactaactccagtaattccttggtggtacgaacatccaatgaagcacacaagtttgtttgcttttcgtgcatgatattaaatagcttggcagcaacaggactaggatgagtagcagcacgttccttatatgtagctttcgacatgatttatcttcgtttcctgcaggtttttgttctgtgcagttgggttaagaatactgggcaatttcatgtttcttcaacactacatatgcgtatatataccaatctaagtctgtgctccttccttcgttcttccttctgttcggagattaccgaatcaaaaaaatttcaaagaaaccgaaatcaaaaaaaagaataaaaaaaaaatgatgaattgaattgaaaagctagcttatcgatgataagctgtcaaagatgagaattaattccacggactatagactatactagatactccgtctactgtacgatacacttccgctcaggtccttgtcctttaacgaggccttaccactcttttgttactctattgatccagctcagcaaaggcagtgtgatctaagattctatcttcgcgatgtagtaaaactagctagaccgagaaagagactagaaatgcaaaaggcacttctacaatggctgccatcattattatccgatgtgacgctgcagcttctcaatgatattcgaatacgctttgaggagatacagcctaatatccgacaaactgttttacagatttacgatcgtacttgttacccatcattgaattttgaacatccgaacctgggagttttccctgaaacagatagtatatttgaacctgtataataatatatagtctagcgctttacggaagacaatgtatgtatttcggttcctggagaaactattgcatctattgcataggtaatcttgcacgtcgcatccccggttcattttctgcgtttccatcttgcacttcaatagcatatctttgttcgcttgcctgtaacttacacgcgcctcgtatcttttaatgatggaataatttgggaatttactctgtgtttatttatttttatgttttgtatttggattttagaaagtaaataaagaaggtagaagagttacggaatgaagaaaaaaaaataaacaaaggtttaaaaaatttcaacaaaaagcgtactttacatatatatttattagacaagaaaagcagattaaatagatatacattcgattaacgataagtaaaatgtaaaatcacaggattttcgtgtgtggtcttctacacagacaagatgaaacaattcggcattaatacctgagagcaggaagagcaagataaaaggtagtatttgttggcgatccccctagagtcttttacatcttcggaaaacaaaaactattttttctttaatttctttttttactttctatttttaatttatatatttatattaaaaaatttaaattataattatttttatagcacgtgatgaaaaggaccgggaagctccaccccggttgataatcagaaaagccccaaaaacaggaagattgtataagcaaatatttaaattgtaaacgttaatattttgttaaaattcgcgttaaatttttgttaaatcagctcattttttaacgaatagcccgaaatcggcaaaatcccttataaatcaaaagaatagaccgagatagggttgagtgttgttccagtttccaacaagagtccactattaaagaacgtggactccaacgtcaaagggcgaaaaagggtctatcagggcgatggcccactacgtgaaccatcaccctaatcaagttttttggggtcgaggtgccgtaaagcagtaaatcggaagggtaaacggatgcccccatttagagcttgacggggaaagccggcgaacgtggcgagaaaggaagggaagaaagcgaaaggagcgggggctagggcggtgggaagtgtaggggtcacgctgggcgtaaccaccacacccgccgcgcttaatggggcgctacagggcgcgtggggatgatccactagtacggattagaagccgccgagcgggtgacagccctccgaaggaagactctcctccgtgcgtcctcgtcttcaccggtcgcgttcctgaaacgcagatgtgcctcgcgccgcactgctccgaacaataaagattctacaatactagcttttatggttatgaagaggaaaaattggcagtaacctggccccacaaaccttcaaatgaacgaatcaaattaacaaccataggatgataatgcgattagttttttagccttatttctggggtaattaatcagcgaagcgatgatttttgatctattaacagatatataaatgcaaaaactgcataaccactttaactaatactttcaacattttcggtttgtattacttcttattcaaatgtaataaaagtatcaacaaaaaattgttaatatacctctatactttaacgtcaaggagaaaaaaccccggatcggactactagcagctgtaatacgactcactatagggaatattaagcttaaacaatgaggcaggtttggttctcttggattgtgggattgttcctatgttttttcaacgtgtcttctgctgctccagtcaacactacaacagaagatgaaacggcacaaattccggctgaagctgtcatcggttactcagatttagaaggggatttcgatgttgctgttttgccattttccaacagcacaaataacgggttattgtttataaatactactattgccagcattgctgctaaagaagaaggggtatctctcgagaaaagagaggctgaagctatgccagtcgaaaacttcttgaagtgcttctcccaatatatcccaaacaacgctactaacgggaagttagtttacactcaaaacaatccattatacatgtctgtcttaaactctactattcataacttaagatttacttccgatcggacccctaagccattggttatcgtcaccccaacgcacgtctcccatatccaaggtactatcttatgttctaagaaggttggtttgcaaatccgtactagatctggtggtcacgactctgaaggtatgtcctatatctctcaagtcccatttgtcattgttgacttaagaaatatgagatccattaaaattgatgttcattctcaaactgcttgggtcgaagctggtgccaccttgggtgaagtttactactgggtcaacgaaaaaaacgaaaacttatctttagctgccggttactgtccaaccgtctgtgctggtggtcatttcggtggtggtggttacggtccattgatgcgtaactacggtttagctgctgacaacattattgacgctcatttagttaatgttcacggtaaggttttggacagaaaatctatgggtgaagatttattttgggccttgagaggtggtggtgctgaatccttcggtatcatcgttgcctggaagattcgtttagttgctgtcccttctaagtccaccatgttctccgtcaagaaaatcatggaaattcatgagttggtcaaattggttaacaagtggcaaaacatcgcttacaagtatgacaaggatttgttgttaatgactcacttcatcacccgtaatatcaccgacaaccaaggtaagaacaaaactgctattcacacctacttctcctccgtttttttgggtggtgtcgactccttagtcgatttgatgaacaaatcctttccagaattgggtattaagaaaactgattgtagacaattgtcttggattgacaccattatcttctattctggtgtcgttaactacgacaccgacaactttaacaaggaaattttgttggatcgttctgctggtcaaaatggtgccttcaaaatcaaattggactacgtcaaaaagccaatcccagaatctgttttcgttcaaattttggaaaagttgtacgaagaagacattggtgccggtatgtatgctttgtatccatatggtggtatcatggacgaaatttccgaatctgccatcccattcccacacagagctggtattttatatgaattgtggtacatctgttcttgggaaaagcaagaagacaacgaaaagcatttaaactggattagaaacatttacaacttcatgaccccatacgtttctaagaacccaagattagcctatttgaactaccgtgacttagatattggtattaatgacccaaagaacccaaacaactatactcaagccagaatttggggtgaaaagtacttcggtaagaacttcgatagattagttaaggttaaaactttggtcgatccaaacaacttcttcagaaacgaacaatccatcccaccattgccaagacatcgtcacggccatcatcaccatcaccattagctcgagcatgcatctagagggccgcatcatgtaattagttatgtcacgcttacattcacgccctccccccacatccgctctaaccgaaaaggaaggagttagacaacctgaagtctaggtccctatttatttttttatagttatgttagtattaagaacgttatttatatttcaaatttttcttttttttctgtacagacgcgtgtacgcatgtaacattatactgaaaaccttgcttgagaaggttttgggacgctcgaaggctttaatttgcggccctgcattaatgaatcggccaacgcgcggggagaggcggtttgcgtattgggcgctcttccgcttcctcgctcactgactcgctgcgctcggtcgttcggctgcggcgagcggtatcagctcactcaaaggcggtaatacggttatccacagaatcaggggataacgcaggaaagaacatgtgagcaaaaggccagcaaaagcccaggaaccgtaaaaaggccgcgttgctggcgtttttccataggctccgcccccctgacgagcatcacaaaaatcgacgctcaagtcagaggtggcgaaacccgacaggactataaagataccaggcgtttccccctggaagctccctcgtgcgctctcctgttccgaccctgccgcttaccggatacctgtccgcctttctcccttcgggaagcgtggcgctttctcatagctcacgctgtaggtatctcagttcggtgtaggtcgttcgctccaagctgggctgtgtgcacgaaccccccgttcagcccgaccgctgcgccttatccggtaactatcgtcttgagtccaacccggtaagacacgacttatcgccactggcagcagccactggtaacaggattagcagagcgaggtatgtaggcggtgctacagagttcttgaagtggtggcctaactacggctacactagaagaacagtatttggtatctgcgctctgctgaagccagttaccttcggaaaaagagttggtagctcttgatccggcaaacaaaccaccgctggtagcggtggtttttttgtttgcaagcagcagattacgcgcagaaaaaaaggatctcaagaagatcctttgatcttttctacggggtctgacgctcagtggaacgaaaactcacgttaagggattttggtcatgagattatcaaaaaggatcttcacctagatccttttaaattaaaaatgaagttttaaatcaatctaaagtatatatgagtaaacttggtctgacagttaccaatgcttaatcagtgaggcacctatctcagcgatctgtctatttcgttcatccatagttgcctgactccccgtcgtgtagataactacgatacgggagcgcttaccatctggccccagtgctgcaatgataccgcgagacccacgctcaccggctccagatttatcagcaataaaccagccagccggaagggccgagcgcagaagtggtcctgcaactttatccgcctccattcagtctattaattgttgccgggaagctagagtaagtagttcgccagttaatagtttgcgcaacgttgttggcattgctacaggcatcgtggtgtcactctcgtcgtttggtatggcttcattcagctccggttcccaacgatcaaggcgagttacatgatcccccatgttgtgcaaaaaagcggttagctccttcggtcctccgatcgttgtcagaagtaagttggccgcagtgttatcactcatggttatggcagcactgcataattctcttactgtcatgccatccgtaagatgcttttctgtgactggtgagtactcaaccaagtcattctgagaatagtgtatgcggcgaccgagttgctcttgcccggcgtcaatacgggataatagtgtatcacatagcagaactttaaaagtgctcatcattggaaaacgttcttcggggcgaaaactctcaaggatcttaccgctgttgagatccagttcgatgtaacccactcgtgcacccaactgatcttcagcatcttttactttcaccagcgtttctgggtgagcaaaaacaggaaggcaaaatgccgcaaaaaagggaataagggcgacacggaaatgttgaatactcatactcttcctttttcaatgggtaataactgatataattaaattgaagctctaatttgtgagtttagtatacatgcatttacttataatacagttttttagttttgctggccgcatcttctcaaatatgcttcccagcctgcttttctgtaacgttcaccctctaccttagcatcccttccctttgcaaatagtcctcttccaacaataataatgtcagatcctgtagagaccacatcatccacggttctatactgttgacccaatgcgtctcccttgtcatctaaacccacaccgggtgtcataatcaaccaatcgtaaccttcatctcttccacccatgtctctttgagcaataaagccgataacaaaatctttgtcgctcttcgcaatgtcaacagtacccttagtatattctccagtagatagggagcccttgcatgacaattctgctaacatcaaaaggcctctaggttcctttgttacttcttctgccgcctgcttcaaaccgctaacaatacctgggcccaccacaccgtgtgcattcgtaatgtctgcccattctgctattctgtatacacccgcagagtactgcaatttgactgtattaccaatgtcagcaaattttctgtcttcg

SEQ ID NO: 58 - DNA, 7266 bp, Artificial Sequence
  OXC154-G351I/I372L
aagagtaaaaaattgtacttggcggataatgcctttagcggcttaactgtgccctccatggaaaaatcagtcaagatatccacatgtgtttttagtaaacaaattttgggacctaatgcttcaactaactccagtaattccttggtggtacgaacatccaatgaagcacacaagtttgtttgcttttcgtgcatgatattaaatagcttggcagcaacaggactaggatgagtagcagcacgttccttatatgtagctttcgacatgatttatcttcgtttcctgcaggtttttgttctgtgcagttgggttaagaatactgggcaatttcatgtttcttcaacactacatatgcgtatatataccaatctaagtctgtgctccttccttcgttcttccttctgttcggagattaccgaatcaaaaaaatttcaaagaaaccgaaatcaaaaaaaagaataaaaaaaaaatgatgaattgaattgaaaagctagcttatcgatgataagctgtcaaagatgagaattaattccacggactatagactatactagatactccgtctactgtacgatacacttccgctcaggtccttgtcctttaacgaggccttaccactcttttgttactctattgatccagctcagcaaaggcagtgtgatctaagattctatcttcgcgatgtagtaaaactagctagaccgagaaagagactagaaatgcaaaaggcacttctacaatggctgccatcattattatccgatgtgacgctgcagcttctcaatgatattcgaatacgctttgaggagatacagcctaatatccgacaaactgttttacagatttacgatcgtacttgttacccatcattgaattttgaacatccgaacctgggagttttccctgaaacagatagtatatttgaacctgtataataatatatagtctagcgctttacggaagacaatgtatgtatttcggttcctggagaaactattgcatctattgcataggtaatcttgcacgtcgcatccccggttcattttctgcgtttccatcttgcacttcaatagcatatctttgttcgcttgcctgtaacttacacgcgcctcgtatcttttaatgatggaataatttgggaatttactctgtgtttatttatttttatgttttgtatttggattttagaaagtaaataaagaaggtagaagagttacggaatgaagaaaaaaaaataaacaaaggtttaaaaaatttcaacaaaaagcgtactttacatatatatttattagacaagaaaagcagattaaatagatatacattcgattaacgataagtaaaatgtaaaatcacaggattttcgtgtgtggtcttctacacagacaagatgaaacaattcggcattaatacctgagagcaggaagagcaagataaaaggtagtatttgttggcgatccccctagagtcttttacatcttcggaaaacaaaaactattttttctttaatttctttttttactttctatttttaatttatatatttatattaaaaaatttaaattataattatttttatagcacgtgatgaaaaggaccgggaagctccaccccggttgataatcagaaaagccccaaaaacaggaagattgtataagcaaatatttaaattgtaaacgttaatattttgttaaaattcgcgttaaatttttgttaaatcagctcattttttaacgaatagcccgaaatcggcaaaatcccttataaatcaaaagaatagaccgagatagggttgagtgttgttccagtttccaacaagagtccactattaaagaacgtggactccaacgtcaaagggcgaaaaagggtctatcagggcgatggcccactacgtgaaccatcaccctaatcaagttttttggggtcgaggtgccgtaaagcagtaaatcggaagggtaaacggatgcccccatttagagcttgacggggaaagccggcgaacgtggcgagaaaggaagggaagaaagcgaaaggagcgggggctagggcggtgggaagtgtaggggtcacgctgggcgtaaccaccacacccgccgcgcttaatggggcgctacagggcgcgtggggatgatccactagtacggattagaagccgccgagcgggtgacagccctccgaaggaagactctcctccgtgcgtcctcgtcttcaccggtcgcgttcctgaaacgcagatgtgcctcgcgccgcactgctccgaacaataaagattctacaatactagcttttatggttatgaagaggaaaaattggcagtaacctggccccacaaaccttcaaatgaacgaatcaaattaacaaccataggatgataatgcgattagttttttagccttatttctggggtaattaatcagcgaagcgatgatttttgatctattaacagatatataaatgcaaaaactgcataaccactttaactaatactttcaacattttcggtttgtattacttcttattcaaatgtaataaaagtatcaacaaaaaattgttaatatacctctatactttaacgtcaaggagaaaaaaccccggatcggactactagcagctgtaatacgactcactatagggaatattaagcttaaacaatgaggcaggtttggttctcttggattgtgggattgttcctatgttttttcaacgtgtcttctgctgctccagtcaacactacaacagaagatgaaacggcacaaattccggctgaagctgtcatcggttactcagatttagaaggggatttcgatgttgctgttttgccattttccaacagcacaaataacgggttattgtttataaatactactattgccagcattgctgctaaagaagaaggggtatctctcgagaaaagagaggctgaagctatgccaagagaaaacttcttgaagtgcttctcccaatatatcccaaacaacgctactaacttaaagttagtttacactcaaaacaatccattatacatgtctgtcttaaactctactattcataacttaagatttacttccgatactacccctaagccattggttatcgtcaccccatctcacgtctcccatatccaaggtactatcttatgttctaagaaggttggtttgcaaatccgtactagatctggtggtcacgactctgaaggtatgtcctatatctctcaagtcccatttgtcattgttgacttaagaaatatgagatccattaaaattgatgttcattctcaaactgcttgggtcgaagctggtgccaccttgggtgaagtttactactgggtcaacgaaaaaaacgaaaacttatctttagctgccggttactgtccaaccgtctgtgctggtggtcatttcggtggtggtggttacggtccattgatgcgtaactacggtttagctgctgacaacattattgacgctcatttagttaatgttcacggtaaggttttggacagaaaatctatgggtgaagatttattttgggccttgagaggtggtggtgctgaatccttcggtatcatcgttgcctggaagattcgtttagttgctgtcccttctaagtccaccatgttctccgtcaagaaaatcatggaaattcatgagttggtcaaattggttaacaagtggcaaaacatcgcttacaagtatgacaaggatttgttgttaatgactcacttcatcacccgtaatatcaccgacaaccaaggtaagaacaaaactgctattcacacctacttctcctccgtttttttgggtggtgtcgactccttagtcgatttgatgaacaaatcctttccagaattgggtattaagaaaactgattgtagacaattgtcttggattgacaccattatcttctattctggtgtcgttaactacgacaccgacaactttaacaaggaaattttgttggatcgttctgctggtcaaaatatcgccttcaaaatcaaattggactacgtcaaaaagccaatcccagaatctgttttcgttcaactgttggaaaagttgtacgaagaagacattggtgccggtatgtatgctttgtatccatatggtggtatcatggacgaaatttccgaatctgccatcccattcccacacagagctggtattttatatgaattgtggtacatctgttcttgggaaaagcaagaagacaacgaaaagcatttaaactggattagaaacatttacaacttcatgaccccatacgtttctaagaacccaagattagcctatttgaactaccgtgacttagatattggtattaatgacccaaagaacccaaacaactatactcaagccagaatttggggtgaaaagtacttcggtaagaacttcgatagattagttaaggttaaaactttggtcgatccaaacaacttcttcagaaacgaacaatccatcccaccattgccaagacatcgtcacggccatcatcaccatcaccattagctcgagcatgcatctagagggccgcatcatgtaattagttatgtcacgcttacattcacgccctccccccacatccgctctaaccgaaaaggaaggagttagacaacctgaagtctaggtccctatttatttttttatagttatgttagtattaagaacgttatttatatttcaaatttttcttttttttctgtacagacgcgtgtacgcatgtaacattatactgaaaaccttgcttgagaaggttttgggacgctcgaaggctttaatttgcggccctgcattaatgaatcggccaacgcgcggggagaggcggtttgcgtattgggcgctcttccgcttcctcgctcactgactcgctgcgctcggtcgttcggctgcggcgagcggtatcagctcactcaaaggcggtaatacggttatccacagaatcaggggataacgcaggaaagaacatgtgagcaaaaggccagcaaaagcccaggaaccgtaaaaaggccgcgttgctggcgtttttccataggctccgcccccctgacgagcatcacaaaaatcgacgctcaagtcagaggtggcgaaacccgacaggactataaagataccaggcgtttccccctggaagctccctcgtgcgctctcctgttccgaccctgccgcttaccggatacctgtccgcctttctcccttcgggaagcgtggcgctttctcatagctcacgctgtaggtatctcagttcggtgtaggtcgttcgctccaagctgggctgtgtgcacgaaccccccgttcagcccgaccgctgcgccttatccggtaactatcgtcttgagtccaacccggtaagacacgacttatcgccactggcagcagccactggtaacaggattagcagagcgaggtatgtaggcggtgctacagagttcttgaagtggtggcctaactacggctacactagaagaacagtatttggtatctgcgctctgctgaagccagttaccttcggaaaaagagttggtagctcttgatccggcaaacaaaccaccgctggtagcggtggtttttttgtttgcaagcagcagattacgcgcagaaaaaaaggatctcaagaagatcctttgatcttttctacggggtctgacgctcagtggaacgaaaactcacgttaagggattttggtcatgagattatcaaaaaggatcttcacctagatccttttaaattaaaaatgaagttttaaatcaatctaaagtatatatgagtaaacttggtctgacagttaccaatgcttaatcagtgaggcacctatctcagcgatctgtctatttcgttcatccatagttgcctgactccccgtcgtgtagataactacgatacgggagcgcttaccatctggccccagtgctgcaatgataccgcgagacccacgctcaccggctccagatttatcagcaataaaccagccagccggaagggccgagcgcagaagtggtcctgcaactttatccgcctccattcagtctattaattgttgccgggaagctagagtaagtagttcgccagttaatagtttgcgcaacgttgttggcattgctacaggcatcgtggtgtcactctcgtcgtttggtatggcttcattcagctccggttcccaacgatcaaggcgagttacatgatcccccatgttgtgcaaaaaagcggttagctccttcggtcctccgatcgttgtcagaagtaagttggccgcagtgttatcactcatggttatggcagcactgcataattctcttactgtcatgccatccgtaagatgcttttctgtgactggtgagtactcaaccaagtcattctgagaatagtgtatgcggcgaccgagttgctcttgcccggcgtcaatacgggataatagtgtatcacatagcagaactttaaaagtgctcatcattggaaaacgttcttcggggcgaaaactctcaaggatcttaccgctgttgagatccagttcgatgtaacccactcgtgcacccaactgatcttcagcatcttttactttcaccagcgtttctgggtgagcaaaaacaggaaggcaaaatgccgcaaaaaagggaataagggcgacacggaaatgttgaatactcatactcttcctttttcaatgggtaataactgatataattaaattgaagctctaatttgtgagtttagtatacatgcatttacttataatacagttttttagttttgctggccgcatcttctcaaatatgcttcccagcctgcttttctgtaacgttcaccctctaccttagcatcccttccctttgcaaatagtcctcttccaacaataataatgtcagatcctgtagagaccacatcatccacggttctatactgttgacccaatgcgtctcccttgtcatctaaacccacaccgggtgtcataatcaaccaatcgtaaccttcatctcttccacccatgtctctttgagcaataaagccgataacaaaatctttgtcgctcttcgcaatgtcaacagtacccttagtatattctccagtagatagggagcccttgcatgacaattctgctaacatcaaaaggcctctaggttcctttgttacttcttctgccgcctgcttcaaaccgctaacaatacctgggcccaccacaccgtgtgcattcgtaatgtctgcccattctgctattctgtatacacccgcagagtactgcaatttgactgtattaccaatgtcagcaaattttctgtcttcg

SEQ ID NO: 59 - DNA, 7266 bp, Artificial Sequence
  OXC154-G351I/A383V/L451G
aagagtaaaaaattgtacttggcggataatgcctttagcggcttaactgtgccctccatggaaaaatcagtcaagatatccacatgtgtttttagtaaacaaattttgggacctaatgcttcaactaactccagtaattccttggtggtacgaacatccaatgaagcacacaagtttgtttgcttttcgtgcatgatattaaatagcttggcagcaacaggactaggatgagtagcagcacgttccttatatgtagctttcgacatgatttatcttcgtttcctgcaggtttttgttctgtgcagttgggttaagaatactgggcaatttcatgtttcttcaacactacatatgcgtatatataccaatctaagtctgtgctccttccttcgttcttccttctgttcggagattaccgaatcaaaaaaatttcaaagaaaccgaaatcaaaaaaaagaataaaaaaaaaatgatgaattgaattgaaaagctagcttatcgatgataagctgtcaaagatgagaattaattccacggactatagactatactagatactccgtctactgtacgatacacttccgctcaggtccttgtcctttaacgaggccttaccactcttttgttactctattgatccagctcagcaaaggcagtgtgatctaagattctatcttcgcgatgtagtaaaactagctagaccgagaaagagactagaaatgcaaaaggcacttctacaatggctgccatcattattatccgatgtgacgctgcagcttctcaatgatattcgaatacgctttgaggagatacagcctaatatccgacaaactgttttacagatttacgatcgtacttgttacccatcattgaattttgaacatccgaacctgggagttttccctgaaacagatagtatatttgaacctgtataataatatatagtctagcgctttacggaagacaatgtatgtatttcggttcctggagaaactattgcatctattgcataggtaatcttgcacgtcgcatccccggttcattttctgcgtttccatcttgcacttcaatagcatatctttgttcgcttgcctgtaacttacacgcgcctcgtatcttttaatgatggaataatttgggaatttactctgtgtttatttatttttatgttttgtatttggattttagaaagtaaataaagaaggtagaagagttacggaatgaagaaaaaaaaataaacaaaggtttaaaaaatttcaacaaaaagcgtactttacatatatatttattagacaagaaaagcagattaaatagatatacattcgattaacgataagtaaaatgtaaaatcacaggattttcgtgtgtggtcttctacacagacaagatgaaacaattcggcattaatacctgagagcaggaagagcaagataaaaggtagtatttgttggcgatccccctagagtcttttacatcttcggaaaacaaaaactattttttctttaatttctttttttactttctatttttaatttatatatttatattaaaaaatttaaattataattatttttatagcacgtgatgaaaaggaccgggaagctccaccccggttgataatcagaaaagccccaaaaacaggaagattgtataagcaaatatttaaattgtaaacgttaatattttgttaaaattcgcgttaaatttttgttaaatcagctcattttttaacgaatagcccgaaatcggcaaaatcccttataaatcaaaagaatagaccgagatagggttgagtgttgttccagtttccaacaagagtccactattaaagaacgtggactccaacgtcaaagggcgaaaaagggtctatcagggcgatggcccactacgtgaaccatcaccctaatcaagttttttggggtcgaggtgccgtaaagcagtaaatcggaagggtaaacggatgcccccatttagagcttgacggggaaagccggcgaacgtggcgagaaaggaagggaagaaagcgaaaggagcgggggctagggcggtgggaagtgtaggggtcacgctgggcgtaaccaccacacccgccgcgcttaatggggcgctacagggcgcgtggggatgatccactagtacggattagaagccgccgagcgggtgacagccctccgaaggaagactctcctccgtgcgtcctcgtcttcaccggtcgcgttcctgaaacgcagatgtgcctcgcgccgcactgctccgaacaataaagattctacaatactagcttttatggttatgaagaggaaaaattggcagtaacctggccccacaaaccttcaaatgaacgaatcaaattaacaaccataggatgataatgcgattagttttttagccttatttctggggtaattaatcagcgaagcgatgatttttgatctattaacagatatataaatgcaaaaactgcataaccactttaactaatactttcaacattttcggtttgtattacttcttattcaaatgtaataaaagtatcaacaaaaaattgttaatatacctctatactttaacgtcaaggagaaaaaaccccggatcggactactagcagctgtaatacgactcactatagggaatattaagcttaaacaatgaggcaggtttggttctcttggattgtgggattgttcctatgttttttcaacgtgtcttctgctgctccagtcaacactacaacagaagatgaaacggcacaaattccggctgaagctgtcatcggttactcagatttagaaggggatttcgatgttgctgttttgccattttccaacagcacaaataacgggttattgtttataaatactactattgccagcattgctgctaaagaagaaggggtatctctcgagaaaagagaggctgaagctatgccaagagaaaacttcttgaagtgcttctcccaatatatcccaaacaacgctactaacttaaagttagtttacactcaaaacaatccattatacatgtctgtcttaaactctactattcataacttaagatttacttccgatactacccctaagccattggttatcgtcaccccatctcacgtctcccatatccaaggtactatcttatgttctaagaaggttggtttgcaaatccgtactagatctggtggtcacgactctgaaggtatgtcctatatctctcaagtcccatttgtcattgttgacttaagaaatatgagatccattaaaattgatgttcattctcaaactgcttgggtcgaagctggtgccaccttgggtgaagtttactactgggtcaacgaaaaaaacgaaaacttatctttagctgccggttactgtccaaccgtctgtgctggtggtcatttcggtggtggtggttacggtccattgatgcgtaactacggtttagctgctgacaacattattgacgctcatttagttaatgttcacggtaaggttttggacagaaaatctatgggtgaagatttattttgggccttgagaggtggtggtgctgaatccttcggtatcatcgttgcctggaagattcgtttagttgctgtcccttctaagtccaccatgttctccgtcaagaaaatcatggaaattcatgagttggtcaaattggttaacaagtggcaaaacatcgcttacaagtatgacaaggatttgttgttaatgactcacttcatcacccgtaatatcaccgacaaccaaggtaagaacaaaactgctattcacacctacttctcctccgtttttttgggtggtgtcgactccttagtcgatttgatgaacaaatcctttccagaattgggtattaagaaaactgattgtagacaattgtcttggattgacaccattatcttctattctggtgtcgttaactacgacaccgacaactttaacaaggaaattttgttggatcgttctgctggtcaaaatatcgccttcaaaatcaaattggactacgtcaaaaagccaatcccagaatctgttttcgttcaaattttggaaaagttgtacgaagaagacattggtgtgggtatgtatgctttgtatccatatggtggtatcatggacgaaatttccgaatctgccatcccattcccacacagagctggtattttatatgaattgtggtacatctgttcttgggaaaagcaagaagacaacgaaaagcatttaaactggattagaaacatttacaacttcatgaccccatacgtttctaagaacccaagaggcgcctatttgaactaccgtgacttagatattggtattaatgacccaaagaacccaaacaactatactcaagccagaatttggggtgaaaagtacttcggtaagaacttcgatagattagttaaggttaaaactttggtcgatccaaacaacttcttcagaaacgaacaatccatcccaccattgccaagacatcgtcacggccatcatcaccatcaccattagctcgagcatgcatctagagggccgcatcatgtaattagttatgtcacgcttacattcacgccctccccccacatccgctctaaccgaaaaggaaggagttagacaacctgaagtctaggtccctatttatttttttatagttatgttagtattaagaacgttatttatatttcaaatttttcttttttttctgtacagacgcgtgtacgcatgtaacattatactgaaaaccttgcttgagaaggttttgggacgctcgaaggctttaatttgcggccctgcattaatgaatcggccaacgcgcggggagaggcggtttgcgtattgggcgctcttccgcttcctcgctcactgactcgctgcgctcggtcgttcggctgcggcgagcggtatcagctcactcaaaggcggtaatacggttatccacagaatcaggggataacgcaggaaagaacatgtgagcaaaaggccagcaaaagcccaggaaccgtaaaaaggccgcgttgctggcgtttttccataggctccgcccccctgacgagcatcacaaaaatcgacgctcaagtcagaggtggcgaaacccgacaggactataaagataccaggcgtttccccctggaagctccctcgtgcgctctcctgttccgaccctgccgcttaccggatacctgtccgcctttctcccttcgggaagcgtggcgctttctcatagctcacgctgtaggtatctcagttcggtgtaggtcgttcgctccaagctgggctgtgtgcacgaaccccccgttcagcccgaccgctgcgccttatccggtaactatcgtcttgagtccaacccggtaagacacgacttatcgccactggcagcagccactggtaacaggattagcagagcgaggtatgtaggcggtgctacagagttcttgaagtggtggcctaactacggctacactagaagaacagtatttggtatctgcgctctgctgaagccagttaccttcggaaaaagagttggtagctcttgatccggcaaacaaaccaccgctggtagcggtggtttttttgtttgcaagcagcagattacgcgcagaaaaaaaggatctcaagaagatcctttgatcttttctacggggtctgacgctcagtggaacgaaaactcacgttaagggattttggtcatgagattatcaaaaaggatcttcacctagatccttttaaattaaaaatgaagttttaaatcaatctaaagtatatatgagtaaacttggtctgacagttaccaatgcttaatcagtgaggcacctatctcagcgatctgtctatttcgttcatccatagttgcctgactccccgtcgtgtagataactacgatacgggagcgcttaccatctggccccagtgctgcaatgataccgcgagacccacgctcaccggctccagatttatcagcaataaaccagccagccggaagggccgagcgcagaagtggtcctgcaactttatccgcctccattcagtctattaattgttgccgggaagctagagtaagtagttcgccagttaatagtttgcgcaacgttgttggcattgctacaggcatcgtggtgtcactctcgtcgtttggtatggcttcattcagctccggttcccaacgatcaaggcgagttacatgatcccccatgttgtgcaaaaaagcggttagctccttcggtcctccgatcgttgtcagaagtaagttggccgcagtgttatcactcatggttatggcagcactgcataattctcttactgtcatgccatccgtaagatgcttttctgtgactggtgagtactcaaccaagtcattctgagaatagtgtatgcggcgaccgagttgctcttgcccggcgtcaatacgggataatagtgtatcacatagcagaactttaaaagtgctcatcattggaaaacgttcttcggggcgaaaactctcaaggatcttaccgctgttgagatccagttcgatgtaacccactcgtgcacccaactgatcttcagcatcttttactttcaccagcgtttctgggtgagcaaaaacaggaaggcaaaatgccgcaaaaaagggaataagggcgacacggaaatgttgaatactcatactcttcctttttcaatgggtaataactgatataattaaattgaagctctaatttgtgagtttagtatacatgcatttacttataatacagttttttagttttgctggccgcatcttctcaaatatgcttcccagcctgcttttctgtaacgttcaccctctaccttagcatcccttccctttgcaaatagtcctcttccaacaataataatgtcagatcctgtagagaccacatcatccacggttctatactgttgacccaatgcgtctcccttgtcatctaaacccacaccgggtgtcataatcaaccaatcgtaaccttcatctcttccacccatgtctctttgagcaataaagccgataacaaaatctttgtcgctcttcgcaatgtcaacagtacccttagtatattctccagtagatagggagcccttgcatgacaattctgctaacatcaaaaggcctctaggttcctttgttacttcttctgccgcctgcttcaaaccgctaacaatacctgggcccaccacaccgtgtgcattcgtaatgtctgcccattctgctattctgtatacacccgcagagtactgcaatttgactgtattaccaatgtcagcaaattttctgtcttcg

SEQ ID NO: 60 - DNA, 7266 bp, Artificial Sequence
  OXC154-G351R/I372L/L451G
aagagtaaaaaattgtacttggcggataatgcctttagcggcttaactgtgccctccatggaaaaatcagtcaagatatccacatgtgtttttagtaaacaaattttgggacctaatgcttcaactaactccagtaattccttggtggtacgaacatccaatgaagcacacaagtttgtttgcttttcgtgcatgatattaaatagcttggcagcaacaggactaggatgagtagcagcacgttccttatatgtagctttcgacatgatttatcttcgtttcctgcaggtttttgttctgtgcagttgggttaagaatactgggcaatttcatgtttcttcaacactacatatgcgtatatataccaatctaagtctgtgctccttccttcgttcttccttctgttcggagattaccgaatcaaaaaaatttcaaagaaaccgaaatcaaaaaaaagaataaaaaaaaaatgatgaattgaattgaaaagctagcttatcgatgataagctgtcaaagatgagaattaattccacggactatagactatactagatactccgtctactgtacgatacacttccgctcaggtccttgtcctttaacgaggccttaccactcttttgttactctattgatccagctcagcaaaggcagtgtgatctaagattctatcttcgcgatgtagtaaaactagctagaccgagaaagagactagaaatgcaaaaggcacttctacaatggctgccatcattattatccgatgtgacgctgcagcttctcaatgatattcgaatacgctttgaggagatacagcctaatatccgacaaactgttttacagatttacgatcgtacttgttacccatcattgaattttgaacatccgaacctgggagttttccctgaaacagatagtatatttgaacctgtataataatatatagtctagcgctttacggaagacaatgtatgtatttcggttcctggagaaactattgcatctattgcataggtaatcttgcacgtcgcatccccggttcattttctgcgtttccatcttgcacttcaatagcatatctttgttcgcttgcctgtaacttacacgcgcctcgtatcttttaatgatggaataatttgggaatttactctgtgtttatttatttttatgttttgtatttggattttagaaagtaaataaagaaggtagaagagttacggaatgaagaaaaaaaaataaacaaaggtttaaaaaatttcaacaaaaagcgtactttacatatatatttattagacaagaaaagcagattaaatagatatacattcgattaacgataagtaaaatgtaaaatcacaggattttcgtgtgtggtcttctacacagacaagatgaaacaattcggcattaatacctgagagcaggaagagcaagataaaaggtagtatttgttggcgatccccctagagtcttttacatcttcggaaaacaaaaactattttttctttaatttctttttttactttctatttttaatttatatatttatattaaaaaatttaaattataattatttttatagcacgtgatgaaaaggaccgggaagctccaccccggttgataatcagaaaagccccaaaaacaggaagattgtataagcaaatatttaaattgtaaacgttaatattttgttaaaattcgcgttaaatttttgttaaatcagctcattttttaacgaatagcccgaaatcggcaaaatcccttataaatcaaaagaatagaccgagatagggttgagtgttgttccagtttccaacaagagtccactattaaagaacgtggactccaacgtcaaagggcgaaaaagggtctatcagggcgatggcccactacgtgaaccatcaccctaatcaagttttttggggtcgaggtgccgtaaagcagtaaatcggaagggtaaacggatgcccccatttagagcttgacggggaaagccggcgaacgtggcgagaaaggaagggaagaaagcgaaaggagcgggggctagggcggtgggaagtgtaggggtcacgctgggcgtaaccaccacacccgccgcgcttaatggggcgctacagggcgcgtggggatgatccactagtacggattagaagccgccgagcgggtgacagccctccgaaggaagactctcctccgtgcgtcctcgtcttcaccggtcgcgttcctgaaacgcagatgtgcctcgcgccgcactgctccgaacaataaagattctacaatactagcttttatggttatgaagaggaaaaattggcagtaacctggccccacaaaccttcaaatgaacgaatcaaattaacaaccataggatgataatgcgattagttttttagccttatttctggggtaattaatcagcgaagcgatgatttttgatctattaacagatatataaatgcaaaaactgcataaccactttaactaatactttcaacattttcggtttgtattacttcttattcaaatgtaataaaagtatcaacaaaaaattgttaatatacctctatactttaacgtcaaggagaaaaaaccccggatcggactactagcagctgtaatacgactcactatagggaatattaagcttaaacaatgaggcaggtttggttctcttggattgtgggattgttcctatgttttttcaacgtgtcttctgctgctccagtcaacactacaacagaagatgaaacggcacaaattccggctgaagctgtcatcggttactcagatttagaaggggatttcgatgttgctgttttgccattttccaacagcacaaataacgggttattgtttataaatactactattgccagcattgctgctaaagaagaaggggtatctctcgagaaaagagaggctgaagctatgccaagagaaaacttcttgaagtgcttctcccaatatatcccaaacaacgctactaacttaaagttagtttacactcaaaacaatccattatacatgtctgtcttaaactctactattcataacttaagatttacttccgatactacccctaagccattggttatcgtcaccccatctcacgtctcccatatccaaggtactatcttatgttctaagaaggttggtttgcaaatccgtactagatctggtggtcacgactctgaaggtatgtcctatatctctcaagtcccatttgtcattgttgacttaagaaatatgagatccattaaaattgatgttcattctcaaactgcttgggtcgaagctggtgccaccttgggtgaagtttactactgggtcaacgaaaaaaacgaaaacttatctttagctgccggttactgtccaaccgtctgtgctggtggtcatttcggtggtggtggttacggtccattgatgcgtaactacggtttagctgctgacaacattattgacgctcatttagttaatgttcacggtaaggttttggacagaaaatctatgggtgaagatttattttgggccttgagaggtggtggtgctgaatccttcggtatcatcgttgcctggaagattcgtttagttgctgtcccttctaagtccaccatgttctccgtcaagaaaatcatggaaattcatgagttggtcaaattggttaacaagtggcaaaacatcgcttacaagtatgacaaggatttgttgttaatgactcacttcatcacccgtaatatcaccgacaaccaaggtaagaacaaaactgctattcacacctacttctcctccgtttttttgggtggtgtcgactccttagtcgatttgatgaacaaatcctttccagaattgggtattaagaaaactgattgtagacaattgtcttggattgacaccattatcttctattctggtgtcgttaactacgacaccgacaactttaacaaggaaattttgttggatcgttctgctggtcaaaatagggccttcaaaatcaaattggactacgtcaaaaagccaatcccagaatctgttttcgttcaactgttggaaaagttgtacgaagaagacattggtgccggtatgtatgctttgtatccatatggtggtatcatggacgaaatttccgaatctgccatcccattcccacacagagctggtattttatatgaattgtggtacatctgttcttgggaaaagcaagaagacaacgaaaagcatttaaactggattagaaacatttacaacttcatgaccccatacgtttctaagaacccaagaggcgcctatttgaactaccgtgacttagatattggtattaatgacccaaagaacccaaacaactatactcaagccagaatttggggtgaaaagtacttcggtaagaacttcgatagattagttaaggttaaaactttggtcgatccaaacaacttcttcagaaacgaacaatccatcccaccattgccaagacatcgtcacggccatcatcaccatcaccattagctcgagcatgcatctagagggccgcatcatgtaattagttatgtcacgcttacattcacgccctccccccacatccgctctaaccgaaaaggaaggagttagacaacctgaagtctaggtccctatttatttttttatagttatgttagtattaagaacgttatttatatttcaaatttttcttttttttctgtacagacgcgtgtacgcatgtaacattatactgaaaaccttgcttgagaaggttttgggacgctcgaaggctttaatttgcggccctgcattaatgaatcggccaacgcgcggggagaggcggtttgcgtattgggcgctcttccgcttcctcgctcactgactcgctgcgctcggtcgttcggctgcggcgagcggtatcagctcactcaaaggcggtaatacggttatccacagaatcaggggataacgcaggaaagaacatgtgagcaaaaggccagcaaaagcccaggaaccgtaaaaaggccgcgttgctggcgtttttccataggctccgcccccctgacgagcatcacaaaaatcgacgctcaagtcagaggtggcgaaacccgacaggactataaagataccaggcgtttccccctggaagctccctcgtgcgctctcctgttccgaccctgccgcttaccggatacctgtccgcctttctcccttcgggaagcgtggcgctttctcatagctcacgctgtaggtatctcagttcggtgtaggtcgttcgctccaagctgggctgtgtgcacgaaccccccgttcagcccgaccgctgcgccttatccggtaactatcgtcttgagtccaacccggtaagacacgacttatcgccactggcagcagccactggtaacaggattagcagagcgaggtatgtaggcggtgctacagagttcttgaagtggtggcctaactacggctacactagaagaacagtatttggtatctgcgctctgctgaagccagttaccttcggaaaaagagttggtagctcttgatccggcaaacaaaccaccgctggtagcggtggtttttttgtttgcaagcagcagattacgcgcagaaaaaaaggatctcaagaagatcctttgatcttttctacggggtctgacgctcagtggaacgaaaactcacgttaagggattttggtcatgagattatcaaaaaggatcttcacctagatccttttaaattaaaaatgaagttttaaatcaatctaaagtatatatgagtaaacttggtctgacagttaccaatgcttaatcagtgaggcacctatctcagcgatctgtctatttcgttcatccatagttgcctgactccccgtcgtgtagataactacgatacgggagcgcttaccatctggccccagtgctgcaatgataccgcgagacccacgctcaccggctccagatttatcagcaataaaccagccagccggaagggccgagcgcagaagtggtcctgcaactttatccgcctccattcagtctattaattgttgccgggaagctagagtaagtagttcgccagttaatagtttgcgcaacgttgttggcattgctacaggcatcgtggtgtcactctcgtcgtttggtatggcttcattcagctccggttcccaacgatcaaggcgagttacatgatcccccatgttgtgcaaaaaagcggttagctccttcggtcctccgatcgttgtcagaagtaagttggccgcagtgttatcactcatggttatggcagcactgcataattctcttactgtcatgccatccgtaagatgcttttctgtgactggtgagtactcaaccaagtcattctgagaatagtgtatgcggcgaccgagttgctcttgcccggcgtcaatacgggataatagtgtatcacatagcagaactttaaaagtgctcatcattggaaaacgttcttcggggcgaaaactctcaaggatcttaccgctgttgagatccagttcgatgtaacccactcgtgcacccaactgatcttcagcatcttttactttcaccagcgtttctgggtgagcaaaaacaggaaggcaaaatgccgcaaaaaagggaataagggcgacacggaaatgttgaatactcatactcttcctttttcaatgggtaataactgatataattaaattgaagctctaatttgtgagtttagtatacatgcatttacttataatacagttttttagttttgctggccgcatcttctcaaatatgcttcccagcctgcttttctgtaacgttcaccctctaccttagcatcccttccctttgcaaatagtcctcttccaacaataataatgtcagatcctgtagagaccacatcatccacggttctatactgttgacccaatgcgtctcccttgtcatctaaacccacaccgggtgtcataatcaaccaatcgtaaccttcatctcttccacccatgtctctttgagcaataaagccgataacaaaatctttgtcgctcttcgcaatgtcaacagtacccttagtatattctccagtagatagggagcccttgcatgacaattctgctaacatcaaaaggcctctaggttcctttgttacttcttctgccgcctgcttcaaaccgctaacaatacctgggcccaccacaccgtgtgcattcgtaatgtctgcccattctgctattctgtatacacccgcagagtactgcaatttgactgtattaccaatgtcagcaaattttctgtcttcg

SEQ ID NO: 61 - DNA, 7266 bp, Artificial Sequence
  OXC154-G351I/I372L/A383V/L451G
aagagtaaaaaattgtacttggcggataatgcctttagcggcttaactgtgccctccatggaaaaatcagtcaagatatccacatgtgtttttagtaaacaaattttgggacctaatgcttcaactaactccagtaattccttggtggtacgaacatccaatgaagcacacaagtttgtttgcttttcgtgcatgatattaaatagcttggcagcaacaggactaggatgagtagcagcacgttccttatatgtagctttcgacatgatttatcttcgtttcctgcaggtttttgttctgtgcagttgggttaagaatactgggcaatttcatgtttcttcaacactacatatgcgtatatataccaatctaagtctgtgctccttccttcgttcttccttctgttcggagattaccgaatcaaaaaaatttcaaagaaaccgaaatcaaaaaaaagaataaaaaaaaaatgatgaattgaattgaaaagctagcttatcgatgataagctgtcaaagatgagaattaattccacggactatagactatactagatactccgtctactgtacgatacacttccgctcaggtccttgtcctttaacgaggccttaccactcttttgttactctattgatccagctcagcaaaggcagtgtgatctaagattctatcttcgcgatgtagtaaaactagctagaccgagaaagagactagaaatgcaaaaggcacttctacaatggctgccatcattattatccgatgtgacgctgcagcttctcaatgatattcgaatacgctttgaggagatacagcctaatatccgacaaactgttttacagatttacgatcgtacttgttacccatcattgaattttgaacatccgaacctgggagttttccctgaaacagatagtatatttgaacctgtataataatatatagtctagcgctttacggaagacaatgtatgtatttcggttcctggagaaactattgcatctattgcataggtaatcttgcacgtcgcatccccggttcattttctgcgtttccatcttgcacttcaatagcatatctttgttcgcttgcctgtaacttacacgcgcctcgtatcttttaatgatggaataatttgggaatttactctgtgtttatttatttttatgttttgtatttggattttagaaagtaaataaagaaggtagaagagttacggaatgaagaaaaaaaaataaacaaaggtttaaaaaatttcaacaaaaagcgtactttacatatatatttattagacaagaaaagcagattaaatagatatacattcgattaacgataagtaaaatgtaaaatcacaggattttcgtgtgtggtcttctacacagacaagatgaaacaattcggcattaatacctgagagcaggaagagcaagataaaaggtagtatttgttggcgatccccctagagtcttttacatcttcggaaaacaaaaactattttttctttaatttctttttttactttctatttttaatttatatatttatattaaaaaatttaaattataattatttttatagcacgtgatgaaaaggaccgggaagctccaccccggttgataatcagaaaagccccaaaaacaggaagattgtataagcaaatatttaaattgtaaacgttaatattttgttaaaattcgcgttaaatttttgttaaatcagctcattttttaacgaatagcccgaaatcggcaaaatcccttataaatcaaaagaatagaccgagatagggttgagtgttgttccagtttccaacaagagtccactattaaagaacgtggactccaacgtcaaagggcgaaaaagggtctatcagggcgatggcccactacgtgaaccatcaccctaatcaagttttttggggtcgaggtgccgtaaagcagtaaatcggaagggtaaacggatgcccccatttagagcttgacggggaaagccggcgaacgtggcgagaaaggaagggaagaaagcgaaaggagcgggggctagggcggtgggaagtgtaggggtcacgctgggcgtaaccaccacacccgccgcgcttaatggggcgctacagggcgcgtggggatgatccactagtacggattagaagccgccgagcgggtgacagccctccgaaggaagactctcctccgtgcgtcctcgtcttcaccggtcgcgttcctgaaacgcagatgtgcctcgcgccgcactgctccgaacaataaagattctacaatactagcttttatggttatgaagaggaaaaattggcagtaacctggccccacaaaccttcaaatgaacgaatcaaattaacaaccataggatgataatgcgattagttttttagccttatttctggggtaattaatcagcgaagcgatgatttttgatctattaacagatatataaatgcaaaaactgcataaccactttaactaatactttcaacattttcggtttgtattacttcttattcaaatgtaataaaagtatcaacaaaaaattgttaatatacctctatactttaacgtcaaggagaaaaaaccccggatcggactactagcagctgtaatacgactcactatagggaatattaagcttaaacaatgaggcaggtttggttctcttggattgtgggattgttcctatgttttttcaacgtgtcttctgctgctccagtcaacactacaacagaagatgaaacggcacaaattccggctgaagctgtcatcggttactcagatttagaaggggatttcgatgttgctgttttgccattttccaacagcacaaataacgggttattgtttataaatactactattgccagcattgctgctaaagaagaaggggtatctctcgagaaaagagaggctgaagctatgccaagagaaaacttcttgaagtgcttctcccaatatatcccaaacaacgctactaacttaaagttagtttacactcaaaacaatccattatacatgtctgtcttaaactctactattcataacttaagatttacttccgatactacccctaagccattggttatcgtcaccccatctcacgtctcccatatccaaggtactatcttatgttctaagaaggttggtttgcaaatccgtactagatctggtggtcacgactctgaaggtatgtcctatatctctcaagtcccatttgtcattgttgacttaagaaatatgagatccattaaaattgatgttcattctcaaactgcttgggtcgaagctggtgccaccttgggtgaagtttactactgggtcaacgaaaaaaacgaaaacttatctttagctgccggttactgtccaaccgtctgtgctggtggtcatttcggtggtggtggttacggtccattgatgcgtaactacggtttagctgctgacaacattattgacgctcatttagttaatgttcacggtaaggttttggacagaaaatctatgggtgaagatttattttgggccttgagaggtggtggtgctgaatccttcggtatcatcgttgcctggaagattcgtttagttgctgtcccttctaagtccaccatgttctccgtcaagaaaatcatggaaattcatgagttggtcaaattggttaacaagtggcaaaacatcgcttacaagtatgacaaggatttgttgttaatgactcacttcatcacccgtaatatcaccgacaaccaaggtaagaacaaaactgctattcacacctacttctcctccgtttttttgggtggtgtcgactccttagtcgatttgatgaacaaatcctttccagaattgggtattaagaaaactgattgtagacaattgtcttggattgacaccattatcttctattctggtgtcgttaactacgacaccgacaactttaacaaggaaattttgttggatcgttctgctggtcaaaatatcgccttcaaaatcaaattggactacgtcaaaaagccaatcccagaatctgttttcgttcaactgttggaaaagttgtacgaagaagacattggtgtgggtatgtatgctttgtatccatatggtggtatcatggacgaaatttccgaatctgccatcccattcccacacagagctggtattttatatgaattgtggtacatctgttcttgggaaaagcaagaagacaacgaaaagcatttaaactggattagaaacatttacaacttcatgaccccatacgtttctaagaacccaagaggcgcctatttgaactaccgtgacttagatattggtattaatgacccaaagaacccaaacaactatactcaagccagaatttggggtgaaaagtacttcggtaagaacttcgatagattagttaaggttaaaactttggtcgatccaaacaacttcttcagaaacgaacaatccatcccaccattgccaagacatcgtcacggccatcatcaccatcaccattagctcgagcatgcatctagagggccgcatcatgtaattagttatgtcacgcttacattcacgccctccccccacatccgctctaaccgaaaaggaaggagttagacaacctgaagtctaggtccctatttatttttttatagttatgttagtattaagaacgttatttatatttcaaatttttcttttttttctgtacagacgcgtgtacgcatgtaacattatactgaaaaccttgcttgagaaggttttgggacgctcgaaggctttaatttgcggccctgcattaatgaatcggccaacgcgcggggagaggcggtttgcgtattgggcgctcttccgcttcctcgctcactgactcgctgcgctcggtcgttcggctgcggcgagcggtatcagctcactcaaaggcggtaatacggttatccacagaatcaggggataacgcaggaaagaacatgtgagcaaaaggccagcaaaagcccaggaaccgtaaaaaggccgcgttgctggcgtttttccataggctccgcccccctgacgagcatcacaaaaatcgacgctcaagtcagaggtggcgaaacccgacaggactataaagataccaggcgtttccccctggaagctccctcgtgcgctctcctgttccgaccctgccgcttaccggatacctgtccgcctttctcccttcgggaagcgtggcgctttctcatagctcacgctgtaggtatctcagttcggtgtaggtcgttcgctccaagctgggctgtgtgcacgaaccccccgttcagcccgaccgctgcgccttatccggtaactatcgtcttgagtccaacccggtaagacacgacttatcgccactggcagcagccactggtaacaggattagcagagcgaggtatgtaggcggtgctacagagttcttgaagtggtggcctaactacggctacactagaagaacagtatttggtatctgcgctctgctgaagccagttaccttcggaaaaagagttggtagctcttgatccggcaaacaaaccaccgctggtagcggtggtttttttgtttgcaagcagcagattacgcgcagaaaaaaaggatctcaagaagatcctttgatcttttctacggggtctgacgctcagtggaacgaaaactcacgttaagggattttggtcatgagattatcaaaaaggatcttcacctagatccttttaaattaaaaatgaagttttaaatcaatctaaagtatatatgagtaaacttggtctgacagttaccaatgcttaatcagtgaggcacctatctcagcgatctgtctatttcgttcatccatagttgcctgactccccgtcgtgtagataactacgatacgggagcgcttaccatctggccccagtgctgcaatgataccgcgagacccacgctcaccggctccagatttatcagcaataaaccagccagccggaagggccgagcgcagaagtggtcctgcaactttatccgcctccattcagtctattaattgttgccgggaagctagagtaagtagttcgccagttaatagtttgcgcaacgttgttggcattgctacaggcatcgtggtgtcactctcgtcgtttggtatggcttcattcagctccggttcccaacgatcaaggcgagttacatgatcccccatgttgtgcaaaaaagcggttagctccttcggtcctccgatcgttgtcagaagtaagttggccgcagtgttatcactcatggttatggcagcactgcataattctcttactgtcatgccatccgtaagatgcttttctgtgactggtgagtactcaaccaagtcattctgagaatagtgtatgcggcgaccgagttgctcttgcccggcgtcaatacgggataatagtgtatcacatagcagaactttaaaagtgctcatcattggaaaacgttcttcggggcgaaaactctcaaggatcttaccgctgttgagatccagttcgatgtaacccactcgtgcacccaactgatcttcagcatcttttactttcaccagcgtttctgggtgagcaaaaacaggaaggcaaaatgccgcaaaaaagggaataagggcgacacggaaatgttgaatactcatactcttcctttttcaatgggtaataactgatataattaaattgaagctctaatttgtgagtttagtatacatgcatttacttataatacagttttttagttttgctggccgcatcttctcaaatatgcttcccagcctgcttttctgtaacgttcaccctctaccttagcatcccttccctttgcaaatagtcctcttccaacaataataatgtcagatcctgtagagaccacatcatccacggttctatactgttgacccaatgcgtctcccttgtcatctaaacccacaccgggtgtcataatcaaccaatcgtaaccttcatctcttccacccatgtctctttgagcaataaagccgataacaaaatctttgtcgctcttcgcaatgtcaacagtacccttagtatattctccagtagatagggagcccttgcatgacaattctgctaacatcaaaaggcctctaggttcctttgttacttcttctgccgcctgcttcaaaccgctaacaatacctgggcccaccacaccgtgtgcattcgtaatgtctgcccattctgctattctgtatacacccgcagagtactgcaatttgactgtattaccaatgtcagcaaattttctgtcttcg

SEQ ID NO: 62 - DNA, 7266 bp, Artificial Sequence
  OXC154-G351R/I372L/A383V/L451G
aagagtaaaaaattgtacttggcggataatgcctttagcggcttaactgtgccctccatggaaaaatcagtcaagatatccacatgtgtttttagtaaacaaattttgggacctaatgcttcaactaactccagtaattccttggtggtacgaacatccaatgaagcacacaagtttgtttgcttttcgtgcatgatattaaatagcttggcagcaacaggactaggatgagtagcagcacgttccttatatgtagctttcgacatgatttatcttcgtttcctgcaggtttttgttctgtgcagttgggttaagaatactgggcaatttcatgtttcttcaacactacatatgcgtatatataccaatctaagtctgtgctccttccttcgttcttccttctgttcggagattaccgaatcaaaaaaatttcaaagaaaccgaaatcaaaaaaaagaataaaaaaaaaatgatgaattgaattgaaaagctagcttatcgatgataagctgtcaaagatgagaattaattccacggactatagactatactagatactccgtctactgtacgatacacttccgctcaggtccttgtcctttaacgaggccttaccactcttttgttactctattgatccagctcagcaaaggcagtgtgatctaagattctatcttcgcgatgtagtaaaactagctagaccgagaaagagactagaaatgcaaaaggcacttctacaatggctgccatcattattatccgatgtgacgctgcagcttctcaatgatattcgaatacgctttgaggagatacagcctaatatccgacaaactgttttacagatttacgatcgtacttgttacccatcattgaattttgaacatccgaacctgggagttttccctgaaacagatagtatatttgaacctgtataataatatatagtctagcgctttacggaagacaatgtatgtatttcggttcctggagaaactattgcatctattgcataggtaatcttgcacgtcgcatccccggttcattttctgcgtttccatcttgcacttcaatagcatatctttgttcgcttgcctgtaacttacacgcgcctcgtatcttttaatgatggaataatttgggaatttactctgtgtttatttatttttatgttttgtatttggattttagaaagtaaataaagaaggtagaagagttacggaatgaagaaaaaaaaataaacaaaggtttaaaaaatttcaacaaaaagcgtactttacatatatatttattagacaagaaaagcagattaaatagatatacattcgattaacgataagtaaaatgtaaaatcacaggattttcgtgtgtggtcttctacacagacaagatgaaacaattcggcattaatacctgagagcaggaagagcaagataaaaggtagtatttgttggcgatccccctagagtcttttacatcttcggaaaacaaaaactattttttctttaatttctttttttactttctatttttaatttatatatttatattaaaaaatttaaattataattatttttatagcacgtgatgaaaaggaccgggaagctccaccccggttgataatcagaaaagccccaaaaacaggaagattgtataagcaaatatttaaattgtaaacgttaatattttgttaaaattcgcgttaaatttttgttaaatcagctcattttttaacgaatagcccgaaatcggcaaaatcccttataaatcaaaagaatagaccgagatagggttgagtgttgttccagtttccaacaagagtccactattaaagaacgtggactccaacgtcaaagggcgaaaaagggtctatcagggcgatggcccactacgtgaaccatcaccctaatcaagttttttggggtcgaggtgccgtaaagcagtaaatcggaagggtaaacggatgcccccatttagagcttgacggggaaagccggcgaacgtggcgagaaaggaagggaagaaagcgaaaggagcgggggctagggcggtgggaagtgtaggggtcacgctgggcgtaaccaccacacccgccgcgcttaatggggcgctacagggcgcgtggggatgatccactagtacggattagaagccgccgagcgggtgacagccctccgaaggaagactctcctccgtgcgtcctcgtcttcaccggtcgcgttcctgaaacgcagatgtgcctcgcgccgcactgctccgaacaataaagattctacaatactagcttttatggttatgaagaggaaaaattggcagtaacctggccccacaaaccttcaaatgaacgaatcaaattaacaaccataggatgataatgcgattagttttttagccttatttctggggtaattaatcagcgaagcgatgatttttgatctattaacagatatataaatgcaaaaactgcataaccactttaactaatactttcaacattttcggtttgtattacttcttattcaaatgtaataaaagtatcaacaaaaaattgttaatatacctctatactttaacgtcaaggagaaaaaaccccggatcggactactagcagctgtaatacgactcactatagggaatattaagcttaaacaatgaggcaggtttggttctcttggattgtgggattgttcctatgttttttcaacgtgtcttctgctgctccagtcaacactacaacagaagatgaaacggcacaaattccggctgaagctgtcatcggttactcagatttagaaggggatttcgatgttgctgttttgccattttccaacagcacaaataacgggttattgtttataaatactactattgccagcattgctgctaaagaagaaggggtatctctcgagaaaagagaggctgaagctatgccaagagaaaacttcttgaagtgcttctcccaatatatcccaaacaacgctactaacttaaagttagtttacactcaaaacaatccattatacatgtctgtcttaaactctactattcataacttaagatttacttccgatactacccctaagccattggttatcgtcaccccatctcacgtctcccatatccaaggtactatcttatgttctaagaaggttggtttgcaaatccgtactagatctggtggtcacgactctgaaggtatgtcctatatctctcaagtcccatttgtcattgttgacttaagaaatatgagatccattaaaattgatgttcattctcaaactgcttgggtcgaagctggtgccaccttgggtgaagtttactactgggtcaacgaaaaaaacgaaaacttatctttagctgccggttactgtccaaccgtctgtgctggtggtcatttcggtggtggtggttacggtccattgatgcgtaactacggtttagctgctgacaacattattgacgctcatttagttaatgttcacggtaaggttttggacagaaaatctatgggtgaagatttattttgggccttgagaggtggtggtgctgaatccttcggtatcatcgttgcctggaagattcgtttagttgctgtcccttctaagtccaccatgttctccgtcaagaaaatcatggaaattcatgagttggtcaaattggttaacaagtggcaaaacatcgcttacaagtatgacaaggatttgttgttaatgactcacttcatcacccgtaatatcaccgacaaccaaggtaagaacaaaactgctattcacacctacttctcctccgtttttttgggtggtgtcgactccttagtcgatttgatgaacaaatcctttccagaattgggtattaagaaaactgattgtagacaattgtcttggattgacaccattatcttctattctggtgtcgttaactacgacaccgacaactttaacaaggaaattttgttggatcgttctgctggtcaaaatagggccttcaaaatcaaattggactacgtcaaaaagccaatcccagaatctgttttcgttcaactgttggaaaagttgtacgaagaagacattggtgtgggtatgtatgctttgtatccatatggtggtatcatggacgaaatttccgaatctgccatcccattcccacacagagctggtattttatatgaattgtggtacatctgttcttgggaaaagcaagaagacaacgaaaagcatttaaactggattagaaacatttacaacttcatgaccccatacgtttctaagaacccaagaggcgcctatttgaactaccgtgacttagatattggtattaatgacccaaagaacccaaacaactatactcaagccagaatttggggtgaaaagtacttcggtaagaacttcgatagattagttaaggttaaaactttggtcgatccaaacaacttcttcagaaacgaacaatccatcccaccattgccaagacatcgtcacggccatcatcaccatcaccattagctcgagcatgcatctagagggccgcatcatgtaattagttatgtcacgcttacattcacgccctccccccacatccgctctaaccgaaaaggaaggagttagacaacctgaagtctaggtccctatttatttttttatagttatgttagtattaagaacgttatttatatttcaaatttttcttttttttctgtacagacgcgtgtacgcatgtaacattatactgaaaaccttgcttgagaaggttttgggacgctcgaaggctttaatttgcggccctgcattaatgaatcggccaacgcgcggggagaggcggtttgcgtattgggcgctcttccgcttcctcgctcactgactcgctgcgctcggtcgttcggctgcggcgagcggtatcagctcactcaaaggcggtaatacggttatccacagaatcaggggataacgcaggaaagaacatgtgagcaaaaggccagcaaaagcccaggaaccgtaaaaaggccgcgttgctggcgtttttccataggctccgcccccctgacgagcatcacaaaaatcgacgctcaagtcagaggtggcgaaacccgacaggactataaagataccaggcgtttccccctggaagctccctcgtgcgctctcctgttccgaccctgccgcttaccggatacctgtccgcctttctcccttcgggaagcgtggcgctttctcatagctcacgctgtaggtatctcagttcggtgtaggtcgttcgctccaagctgggctgtgtgcacgaaccccccgttcagcccgaccgctgcgccttatccggtaactatcgtcttgagtccaacccggtaagacacgacttatcgccactggcagcagccactggtaacaggattagcagagcgaggtatgtaggcggtgctacagagttcttgaagtggtggcctaactacggctacactagaagaacagtatttggtatctgcgctctgctgaagccagttaccttcggaaaaagagttggtagctcttgatccggcaaacaaaccaccgctggtagcggtggtttttttgtttgcaagcagcagattacgcgcagaaaaaaaggatctcaagaagatcctttgatcttttctacggggtctgacgctcagtggaacgaaaactcacgttaagggattttggtcatgagattatcaaaaaggatcttcacctagatccttttaaattaaaaatgaagttttaaatcaatctaaagtatatatgagtaaacttggtctgacagttaccaatgcttaatcagtgaggcacctatctcagcgatctgtctatttcgttcatccatagttgcctgactccccgtcgtgtagataactacgatacgggagcgcttaccatctggccccagtgctgcaatgataccgcgagacccacgctcaccggctccagatttatcagcaataaaccagccagccggaagggccgagcgcagaagtggtcctgcaactttatccgcctccattcagtctattaattgttgccgggaagctagagtaagtagttcgccagttaatagtttgcgcaacgttgttggcattgctacaggcatcgtggtgtcactctcgtcgtttggtatggcttcattcagctccggttcccaacgatcaaggcgagttacatgatcccccatgttgtgcaaaaaagcggttagctccttcggtcctccgatcgttgtcagaagtaagttggccgcagtgttatcactcatggttatggcagcactgcataattctcttactgtcatgccatccgtaagatgcttttctgtgactggtgagtactcaaccaagtcattctgagaatagtgtatgcggcgaccgagttgctcttgcccggcgtcaatacgggataatagtgtatcacatagcagaactttaaaagtgctcatcattggaaaacgttcttcggggcgaaaactctcaaggatcttaccgctgttgagatccagttcgatgtaacccactcgtgcacccaactgatcttcagcatcttttactttcaccagcgtttctgggtgagcaaaaacaggaaggcaaaatgccgcaaaaaagggaataagggcgacacggaaatgttgaatactcatactcttcctttttcaatgggtaataactgatataattaaattgaagctctaatttgtgagtttagtatacatgcatttacttataatacagttttttagttttgctggccgcatcttctcaaatatgcttcccagcctgcttttctgtaacgttcaccctctaccttagcatcccttccctttgcaaatagtcctcttccaacaataataatgtcagatcctgtagagaccacatcatccacggttctatactgttgacccaatgcgtctcccttgtcatctaaacccacaccgggtgtcataatcaaccaatcgtaaccttcatctcttccacccatgtctctttgagcaataaagccgataacaaaatctttgtcgctcttcgcaatgtcaacagtacccttagtatattctccagtagatagggagcccttgcatgacaattctgctaacatcaaaaggcctctaggttcctttgttacttcttctgccgcctgcttcaaaccgctaacaatacctgggcccaccacaccgtgtgcattcgtaatgtctgcccattctgctattctgtatacacccgcagagtactgcaatttgactgtattaccaatgtcagcaaattttctgtcttcg

SEQ ID NO: 63 - DNA, 7266 bp, Artificial Sequence
  OXC154-G351I/I372L/A383V
aagagtaaaaaattgtacttggcggataatgcctttagcggcttaactgtgccctccatggaaaaatcagtcaagatatccacatgtgtttttagtaaacaaattttgggacctaatgcttcaactaactccagtaattccttggtggtacgaacatccaatgaagcacacaagtttgtttgcttttcgtgcatgatattaaatagcttggcagcaacaggactaggatgagtagcagcacgttccttatatgtagctttcgacatgatttatcttcgtttcctgcaggtttttgttctgtgcagttgggttaagaatactgggcaatttcatgtttcttcaacactacatatgcgtatatataccaatctaagtctgtgctccttccttcgttcttccttctgttcggagattaccgaatcaaaaaaatttcaaagaaaccgaaatcaaaaaaaagaataaaaaaaaaatgatgaattgaattgaaaagctagcttatcgatgataagctgtcaaagatgagaattaattccacggactatagactatactagatactccgtctactgtacgatacacttccgctcaggtccttgtcctttaacgaggccttaccactcttttgttactctattgatccagctcagcaaaggcagtgtgatctaagattctatcttcgcgatgtagtaaaactagctagaccgagaaagagactagaaatgcaaaaggcacttctacaatggctgccatcattattatccgatgtgacgctgcagcttctcaatgatattcgaatacgctttgaggagatacagcctaatatccgacaaactgttttacagatttacgatcgtacttgttacccatcattgaattttgaacatccgaacctgggagttttccctgaaacagatagtatatttgaacctgtataataatatatagtctagcgctttacggaagacaatgtatgtatttcggttcctggagaaactattgcatctattgcataggtaatcttgcacgtcgcatccccggttcattttctgcgtttccatcttgcacttcaatagcatatctttgttcgcttgcctgtaacttacacgcgcctcgtatcttttaatgatggaataatttgggaatttactctgtgtttatttatttttatgttttgtatttggattttagaaagtaaataaagaaggtagaagagttacggaatgaagaaaaaaaaataaacaaaggtttaaaaaatttcaacaaaaagcgtactttacatatatatttattagacaagaaaagcagattaaatagatatacattcgattaacgataagtaaaatgtaaaatcacaggattttcgtgtgtggtcttctacacagacaagatgaaacaattcggcattaatacctgagagcaggaagagcaagataaaaggtagtatttgttggcgatccccctagagtcttttacatcttcggaaaacaaaaactattttttctttaatttctttttttactttctatttttaatttatatatttatattaaaaaatttaaattataattatttttatagcacgtgatgaaaaggaccgggaagctccaccccggttgataatcagaaaagccccaaaaacaggaagattgtataagcaaatatttaaattgtaaacgttaatattttgttaaaattcgcgttaaatttttgttaaatcagctcattttttaacgaatagcccgaaatcggcaaaatcccttataaatcaaaagaatagaccgagatagggttgagtgttgttccagtttccaacaagagtccactattaaagaacgtggactccaacgtcaaagggcgaaaaagggtctatcagggcgatggcccactacgtgaaccatcaccctaatcaagttttttggggtcgaggtgccgtaaagcagtaaatcggaagggtaaacggatgcccccatttagagcttgacggggaaagccggcgaacgtggcgagaaaggaagggaagaaagcgaaaggagcgggggctagggcggtgggaagtgtaggggtcacgctgggcgtaaccaccacacccgccgcgcttaatggggcgctacagggcgcgtggggatgatccactagtacggattagaagccgccgagcgggtgacagccctccgaaggaagactctcctccgtgcgtcctcgtcttcaccggtcgcgttcctgaaacgcagatgtgcctcgcgccgcactgctccgaacaataaagattctacaatactagcttttatggttatgaagaggaaaaattggcagtaacctggccccacaaaccttcaaatgaacgaatcaaattaacaaccataggatgataatgcgattagttttttagccttatttctggggtaattaatcagcgaagcgatgatttttgatctattaacagatatataaatgcaaaaactgcataaccactttaactaatactttcaacattttcggtttgtattacttcttattcaaatgtaataaaagtatcaacaaaaaattgttaatatacctctatactttaacgtcaaggagaaaaaaccccggatcggactactagcagctgtaatacgactcactatagggaatattaagcttaaacaatgaggcaggtttggttctcttggattgtgggattgttcctatgttttttcaacgtgtcttctgctgctccagtcaacactacaacagaagatgaaacggcacaaattccggctgaagctgtcatcggttactcagatttagaaggggatttcgatgttgctgttttgccattttccaacagcacaaataacgggttattgtttataaatactactattgccagcattgctgctaaagaagaaggggtatctctcgagaaaagagaggctgaagctatgccaagagaaaacttcttgaagtgcttctcccaatatatcccaaacaacgctactaacttaaagttagtttacactcaaaacaatccattatacatgtctgtcttaaactctactattcataacttaagatttacttccgatactacccctaagccattggttatcgtcaccccatctcacgtctcccatatccaaggtactatcttatgttctaagaaggttggtttgcaaatccgtactagatctggtggtcacgactctgaaggtatgtcctatatctctcaagtcccatttgtcattgttgacttaagaaatatgagatccattaaaattgatgttcattctcaaactgcttgggtcgaagctggtgccaccttgggtgaagtttactactgggtcaacgaaaaaaacgaaaacttatctttagctgccggttactgtccaaccgtctgtgctggtggtcatttcggtggtggtggttacggtccattgatgcgtaactacggtttagctgctgacaacattattgacgctcatttagttaatgttcacggtaaggttttggacagaaaatctatgggtgaagatttattttgggccttgagaggtggtggtgctgaatccttcggtatcatcgttgcctggaagattcgtttagttgctgtcccttctaagtccaccatgttctccgtcaagaaaatcatggaaattcatgagttggtcaaattggttaacaagtggcaaaacatcgcttacaagtatgacaaggatttgttgttaatgactcacttcatcacccgtaatatcaccgacaaccaaggtaagaacaaaactgctattcacacctacttctcctccgtttttttgggtggtgtcgactccttagtcgatttgatgaacaaatcctttccagaattgggtattaagaaaactgattgtagacaattgtcttggattgacaccattatcttctattctggtgtcgttaactacgacaccgacaactttaacaaggaaattttgttggatcgttctgctggtcaaaatatcgccttcaaaatcaaattggactacgtcaaaaagccaatcccagaatctgttttcgttcaactgttggaaaagttgtacgaagaagacattggtgtgggtatgtatgctttgtatccatatggtggtatcatggacgaaatttccgaatctgccatcccattcccacacagagctggtattttatatgaattgtggtacatctgttcttgggaaaagcaagaagacaacgaaaagcatttaaactggattagaaacatttacaacttcatgaccccatacgtttctaagaacccaagattagcctatttgaactaccgtgacttagatattggtattaatgacccaaagaacccaaacaactatactcaagccagaatttggggtgaaaagtacttcggtaagaacttcgatagattagttaaggttaaaactttggtcgatccaaacaacttcttcagaaacgaacaatccatcccaccattgccaagacatcgtcacggccatcatcaccatcaccattagctcgagcatgcatctagagggccgcatcatgtaattagttatgtcacgcttacattcacgccctccccccacatccgctctaaccgaaaaggaaggagttagacaacctgaagtctaggtccctatttatttttttatagttatgttagtattaagaacgttatttatatttcaaatttttcttttttttctgtacagacgcgtgtacgcatgtaacattatactgaaaaccttgcttgagaaggttttgggacgctcgaaggctttaatttgcggccctgcattaatgaatcggccaacgcgcggggagaggcggtttgcgtattgggcgctcttccgcttcctcgctcactgactcgctgcgctcggtcgttcggctgcggcgagcggtatcagctcactcaaaggcggtaatacggttatccacagaatcaggggataacgcaggaaagaacatgtgagcaaaaggccagcaaaagcccaggaaccgtaaaaaggccgcgttgctggcgtttttccataggctccgcccccctgacgagcatcacaaaaatcgacgctcaagtcagaggtggcgaaacccgacaggactataaagataccaggcgtttccccctggaagctccctcgtgcgctctcctgttccgaccctgccgcttaccggatacctgtccgcctttctcccttcgggaagcgtggcgctttctcatagctcacgctgtaggtatctcagttcggtgtaggtcgttcgctccaagctgggctgtgtgcacgaaccccccgttcagcccgaccgctgcgccttatccggtaactatcgtcttgagtccaacccggtaagacacgacttatcgccactggcagcagccactggtaacaggattagcagagcgaggtatgtaggcggtgctacagagttcttgaagtggtggcctaactacggctacactagaagaacagtatttggtatctgcgctctgctgaagccagttaccttcggaaaaagagttggtagctcttgatccggcaaacaaaccaccgctggtagcggtggtttttttgtttgcaagcagcagattacgcgcagaaaaaaaggatctcaagaagatcctttgatcttttctacggggtctgacgctcagtggaacgaaaactcacgttaagggattttggtcatgagattatcaaaaaggatcttcacctagatccttttaaattaaaaatgaagttttaaatcaatctaaagtatatatgagtaaacttggtctgacagttaccaatgcttaatcagtgaggcacctatctcagcgatctgtctatttcgttcatccatagttgcctgactccccgtcgtgtagataactacgatacgggagcgcttaccatctggccccagtgctgcaatgataccgcgagacccacgctcaccggctccagatttatcagcaataaaccagccagccggaagggccgagcgcagaagtggtcctgcaactttatccgcctccattcagtctattaattgttgccgggaagctagagtaagtagttcgccagttaatagtttgcgcaacgttgttggcattgctacaggcatcgtggtgtcactctcgtcgtttggtatggcttcattcagctccggttcccaacgatcaaggcgagttacatgatcccccatgttgtgcaaaaaagcggttagctccttcggtcctccgatcgttgtcagaagtaagttggccgcagtgttatcactcatggttatggcagcactgcataattctcttactgtcatgccatccgtaagatgcttttctgtgactggtgagtactcaaccaagtcattctgagaatagtgtatgcggcgaccgagttgctcttgcccggcgtcaatacgggataatagtgtatcacatagcagaactttaaaagtgctcatcattggaaaacgttcttcggggcgaaaactctcaaggatcttaccgctgttgagatccagttcgatgtaacccactcgtgcacccaactgatcttcagcatcttttactttcaccagcgtttctgggtgagcaaaaacaggaaggcaaaatgccgcaaaaaagggaataagggcgacacggaaatgttgaatactcatactcttcctttttcaatgggtaataactgatataattaaattgaagctctaatttgtgagtttagtatacatgcatttacttataatacagttttttagttttgctggccgcatcttctcaaatatgcttcccagcctgcttttctgtaacgttcaccctctaccttagcatcccttccctttgcaaatagtcctcttccaacaataataatgtcagatcctgtagagaccacatcatccacggttctatactgttgacccaatgcgtctcccttgtcatctaaacccacaccgggtgtcataatcaaccaatcgtaaccttcatctcttccacccatgtctctttgagcaataaagccgataacaaaatctttgtcgctcttcgcaatgtcaacagtacccttagtatattctccagtagatagggagcccttgcatgacaattctgctaacatcaaaaggcctctaggttcctttgttacttcttctgccgcctgcttcaaaccgctaacaatacctgggcccaccacaccgtgtgcattcgtaatgtctgcccattctgctattctgtatacacccgcagagtactgcaatttgactgtattaccaatgtcagcaaattttctgtcttcg

SEQ ID NO: 64 - DNA, 7266 bp, Artificial Sequence
  OXC154-N331G/Q349G/I372L/L451G
aagagtaaaaaattgtacttggcggataatgcctttagcggcttaactgtgccctccatggaaaaatcagtcaagatatccacatgtgtttttagtaaacaaattttgggacctaatgcttcaactaactccagtaattccttggtggtacgaacatccaatgaagcacacaagtttgtttgcttttcgtgcatgatattaaatagcttggcagcaacaggactaggatgagtagcagcacgttccttatatgtagctttcgacatgatttatcttcgtttcctgcaggtttttgttctgtgcagttgggttaagaatactgggcaatttcatgtttcttcaacactacatatgcgtatatataccaatctaagtctgtgctccttccttcgttcttccttctgttcggagattaccgaatcaaaaaaatttcaaagaaaccgaaatcaaaaaaaagaataaaaaaaaaatgatgaattgaattgaaaagctagcttatcgatgataagctgtcaaagatgagaattaattccacggactatagactatactagatactccgtctactgtacgatacacttccgctcaggtccttgtcctttaacgaggccttaccactcttttgttactctattgatccagctcagcaaaggcagtgtgatctaagattctatcttcgcgatgtagtaaaactagctagaccgagaaagagactagaaatgcaaaaggcacttctacaatggctgccatcattattatccgatgtgacgctgcagcttctcaatgatattcgaatacgctttgaggagatacagcctaatatccgacaaactgttttacagatttacgatcgtacttgttacccatcattgaattttgaacatccgaacctgggagttttccctgaaacagatagtatatttgaacctgtataataatatatagtctagcgctttacggaagacaatgtatgtatttcggttcctggagaaactattgcatctattgcataggtaatcttgcacgtcgcatccccggttcattttctgcgtttccatcttgcacttcaatagcatatctttgttcgcttgcctgtaacttacacgcgcctcgtatcttttaatgatggaataatttgggaatttactctgtgtttatttatttttatgttttgtatttggattttagaaagtaaataaagaaggtagaagagttacggaatgaagaaaaaaaaataaacaaaggtttaaaaaatttcaacaaaaagcgtactttacatatatatttattagacaagaaaagcagattaaatagatatacattcgattaacgataagtaaaatgtaaaatcacaggattttcgtgtgtggtcttctacacagacaagatgaaacaattcggcattaatacctgagagcaggaagagcaagataaaaggtagtatttgttggcgatccccctagagtcttttacatcttcggaaaacaaaaactattttttctttaatttctttttttactttctatttttaatttatatatttatattaaaaaatttaaattataattatttttatagcacgtgatgaaaaggaccgggaagctccaccccggttgataatcagaaaagccccaaaaacaggaagattgtataagcaaatatttaaattgtaaacgttaatattttgttaaaattcgcgttaaatttttgttaaatcagctcattttttaacgaatagcccgaaatcggcaaaatcccttataaatcaaaagaatagaccgagatagggttgagtgttgttccagtttccaacaagagtccactattaaagaacgtggactccaacgtcaaagggcgaaaaagggtctatcagggcgatggcccactacgtgaaccatcaccctaatcaagttttttggggtcgaggtgccgtaaagcagtaaatcggaagggtaaacggatgcccccatttagagcttgacggggaaagccggcgaacgtggcgagaaaggaagggaagaaagcgaaaggagcgggggctagggcggtgggaagtgtaggggtcacgctgggcgtaaccaccacacccgccgcgcttaatggggcgctacagggcgcgtggggatgatccactagtacggattagaagccgccgagcgggtgacagccctccgaaggaagactctcctccgtgcgtcctcgtcttcaccggtcgcgttcctgaaacgcagatgtgcctcgcgccgcactgctccgaacaataaagattctacaatactagcttttatggttatgaagaggaaaaattggcagtaacctggccccacaaaccttcaaatgaacgaatcaaattaacaaccataggatgataatgcgattagttttttagccttatttctggggtaattaatcagcgaagcgatgatttttgatctattaacagatatataaatgcaaaaactgcataaccactttaactaatactttcaacattttcggtttgtattacttcttattcaaatgtaataaaagtatcaacaaaaaattgttaatatacctctatactttaacgtcaaggagaaaaaaccccggatcggactactagcagctgtaatacgactcactatagggaatattaagcttaaacaatgaggcaggtttggttctcttggattgtgggattgttcctatgttttttcaacgtgtcttctgctgctccagtcaacactacaacagaagatgaaacggcacaaattccggctgaagctgtcatcggttactcagatttagaaggggatttcgatgttgctgttttgccattttccaacagcacaaataacgggttattgtttataaatactactattgccagcattgctgctaaagaagaaggggtatctctcgagaaaagagaggctgaagctatgccaagagaaaacttcttgaagtgcttctcccaatatatcccaaacaacgctactaacttaaagttagtttacactcaaaacaatccattatacatgtctgtcttaaactctactattcataacttaagatttacttccgatactacccctaagccattggttatcgtcaccccatctcacgtctcccatatccaaggtactatcttatgttctaagaaggttggtttgcaaatccgtactagatctggtggtcacgactctgaaggtatgtcctatatctctcaagtcccatttgtcattgttgacttaagaaatatgagatccattaaaattgatgttcattctcaaactgcttgggtcgaagctggtgccaccttgggtgaagtttactactgggtcaacgaaaaaaacgaaaacttatctttagctgccggttactgtccaaccgtctgtgctggtggtcatttcggtggtggtggttacggtccattgatgcgtaactacggtttagctgctgacaacattattgacgctcatttagttaatgttcacggtaaggttttggacagaaaatctatgggtgaagatttattttgggccttgagaggtggtggtgctgaatccttcggtatcatcgttgcctggaagattcgtttagttgctgtcccttctaagtccaccatgttctccgtcaagaaaatcatggaaattcatgagttggtcaaattggttaacaagtggcaaaacatcgcttacaagtatgacaaggatttgttgttaatgactcacttcatcacccgtaatatcaccgacaaccaaggtaagaacaaaactgctattcacacctacttctcctccgtttttttgggtggtgtcgactccttagtcgatttgatgaacaaatcctttccagaattgggtattaagaaaactgattgtagacaattgtcttggattgacaccattatcttctattctggtgtcgttgggtacgacaccgacaactttaacaaggaaattttgttggatcgttctgctggtgggaatggtgccttcaaaatcaaattggactacgtcaaaaagccaatcccagaatctgttttcgttcaactgttggaaaagttgtacgaagaagacattggtgccggtatgtatgctttgtatccatatggtggtatcatggacgaaatttccgaatctgccatcccattcccacacagagctggtattttatatgaattgtggtacatctgttcttgggaaaagcaagaagacaacgaaaagcatttaaactggattagaaacatttacaacttcatgaccccatacgtttctaagaacccaagaggcgcctatttgaactaccgtgacttagatattggtattaatgacccaaagaacccaaacaactatactcaagccagaatttggggtgaaaagtacttcggtaagaacttcgatagattagttaaggttaaaactttggtcgatccaaacaacttcttcagaaacgaacaatccatcccaccattgccaagacatcgtcacggccatcatcaccatcaccattagctcgagcatgcatctagagggccgcatcatgtaattagttatgtcacgcttacattcacgccctccccccacatccgctctaaccgaaaaggaaggagttagacaacctgaagtctaggtccctatttatttttttatagttatgttagtattaagaacgttatttatatttcaaatttttcttttttttctgtacagacgcgtgtacgcatgtaacattatactgaaaaccttgcttgagaaggttttgggacgctcgaaggctttaatttgcggccctgcattaatgaatcggccaacgcgcggggagaggcggtttgcgtattgggcgctcttccgcttcctcgctcactgactcgctgcgctcggtcgttcggctgcggcgagcggtatcagctcactcaaaggcggtaatacggttatccacagaatcaggggataacgcaggaaagaacatgtgagcaaaaggccagcaaaagcccaggaaccgtaaaaaggccgcgttgctggcgtttttccataggctccgcccccctgacgagcatcacaaaaatcgacgctcaagtcagaggtggcgaaacccgacaggactataaagataccaggcgtttccccctggaagctccctcgtgcgctctcctgttccgaccctgccgcttaccggatacctgtccgcctttctcccttcgggaagcgtggcgctttctcatagctcacgctgtaggtatctcagttcggtgtaggtcgttcgctccaagctgggctgtgtgcacgaaccccccgttcagcccgaccgctgcgccttatccggtaactatcgtcttgagtccaacccggtaagacacgacttatcgccactggcagcagccactggtaacaggattagcagagcgaggtatgtaggcggtgctacagagttcttgaagtggtggcctaactacggctacactagaagaacagtatttggtatctgcgctctgctgaagccagttaccttcggaaaaagagttggtagctcttgatccggcaaacaaaccaccgctggtagcggtggtttttttgtttgcaagcagcagattacgcgcagaaaaaaaggatctcaagaagatcctttgatcttttctacggggtctgacgctcagtggaacgaaaactcacgttaagggattttggtcatgagattatcaaaaaggatcttcacctagatccttttaaattaaaaatgaagttttaaatcaatctaaagtatatatgagtaaacttggtctgacagttaccaatgcttaatcagtgaggcacctatctcagcgatctgtctatttcgttcatccatagttgcctgactccccgtcgtgtagataactacgatacgggagcgcttaccatctggccccagtgctgcaatgataccgcgagacccacgctcaccggctccagatttatcagcaataaaccagccagccggaagggccgagcgcagaagtggtcctgcaactttatccgcctccattcagtctattaattgttgccgggaagctagagtaagtagttcgccagttaatagtttgcgcaacgttgttggcattgctacaggcatcgtggtgtcactctcgtcgtttggtatggcttcattcagctccggttcccaacgatcaaggcgagttacatgatcccccatgttgtgcaaaaaagcggttagctccttcggtcctccgatcgttgtcagaagtaagttggccgcagtgttatcactcatggttatggcagcactgcataattctcttactgtcatgccatccgtaagatgcttttctgtgactggtgagtactcaaccaagtcattctgagaatagtgtatgcggcgaccgagttgctcttgcccggcgtcaatacgggataatagtgtatcacatagcagaactttaaaagtgctcatcattggaaaacgttcttcggggcgaaaactctcaaggatcttaccgctgttgagatccagttcgatgtaacccactcgtgcacccaactgatcttcagcatcttttactttcaccagcgtttctgggtgagcaaaaacaggaaggcaaaatgccgcaaaaaagggaataagggcgacacggaaatgttgaatactcatactcttcctttttcaatgggtaataactgatataattaaattgaagctctaatttgtgagtttagtatacatgcatttacttataatacagttttttagttttgctggccgcatcttctcaaatatgcttcccagcctgcttttctgtaacgttcaccctctaccttagcatcccttccctttgcaaatagtcctcttccaacaataataatgtcagatcctgtagagaccacatcatccacggttctatactgttgacccaatgcgtctcccttgtcatctaaacccacaccgggtgtcataatcaaccaatcgtaaccttcatctcttccacccatgtctctttgagcaataaagccgataacaaaatctttgtcgctcttcgcaatgtcaacagtacccttagtatattctccagtagatagggagcccttgcatgacaattctgctaacatcaaaaggcctctaggttcctttgttacttcttctgccgcctgcttcaaaccgctaacaatacctgggcccaccacaccgtgtgcattcgtaatgtctgcccattctgctattctgtatacacccgcagagtactgcaatttgactgtattaccaatgtcagcaaattttctgtcttcg

SEQ ID NO: 65 - DNA, 7266 bp, Artificial Sequence
  OXC154-G351R/A383V/L451G
aagagtaaaaaattgtacttggcggataatgcctttagcggcttaactgtgccctccatggaaaaatcagtcaagatatccacatgtgtttttagtaaacaaattttgggacctaatgcttcaactaactccagtaattccttggtggtacgaacatccaatgaagcacacaagtttgtttgcttttcgtgcatgatattaaatagcttggcagcaacaggactaggatgagtagcagcacgttccttatatgtagctttcgacatgatttatcttcgtttcctgcaggtttttgttctgtgcagttgggttaagaatactgggcaatttcatgtttcttcaacactacatatgcgtatatataccaatctaagtctgtgctccttccttcgttcttccttctgttcggagattaccgaatcaaaaaaatttcaaagaaaccgaaatcaaaaaaaagaataaaaaaaaaatgatgaattgaattgaaaagctagcttatcgatgataagctgtcaaagatgagaattaattccacggactatagactatactagatactccgtctactgtacgatacacttccgctcaggtccttgtcctttaacgaggccttaccactcttttgttactctattgatccagctcagcaaaggcagtgtgatctaagattctatcttcgcgatgtagtaaaactagctagaccgagaaagagactagaaatgcaaaaggcacttctacaatggctgccatcattattatccgatgtgacgctgcagcttctcaatgatattcgaatacgctttgaggagatacagcctaatatccgacaaactgttttacagatttacgatcgtacttgttacccatcattgaattttgaacatccgaacctgggagttttccctgaaacagatagtatatttgaacctgtataataatatatagtctagcgctttacggaagacaatgtatgtatttcggttcctggagaaactattgcatctattgcataggtaatcttgcacgtcgcatccccggttcattttctgcgtttccatcttgcacttcaatagcatatctttgttcgcttgcctgtaacttacacgcgcctcgtatcttttaatgatggaataatttgggaatttactctgtgtttatttatttttatgttttgtatttggattttagaaagtaaataaagaaggtagaagagttacggaatgaagaaaaaaaaataaacaaaggtttaaaaaatttcaacaaaaagcgtactttacatatatatttattagacaagaaaagcagattaaatagatatacattcgattaacgataagtaaaatgtaaaatcacaggattttcgtgtgtggtcttctacacagacaagatgaaacaattcggcattaatacctgagagcaggaagagcaagataaaaggtagtatttgttggcgatccccctagagtcttttacatcttcggaaaacaaaaactattttttctttaatttctttttttactttctatttttaatttatatatttatattaaaaaatttaaattataattatttttatagcacgtgatgaaaaggaccgggaagctccaccccggttgataatcagaaaagccccaaaaacaggaagattgtataagcaaatatttaaattgtaaacgttaatattttgttaaaattcgcgttaaatttttgttaaatcagctcattttttaacgaatagcccgaaatcggcaaaatcccttataaatcaaaagaatagaccgagatagggttgagtgttgttccagtttccaacaagagtccactattaaagaacgtggactccaacgtcaaagggcgaaaaagggtctatcagggcgatggcccactacgtgaaccatcaccctaatcaagttttttggggtcgaggtgccgtaaagcagtaaatcggaagggtaaacggatgcccccatttagagcttgacggggaaagccggcgaacgtggcgagaaaggaagggaagaaagcgaaaggagcgggggctagggcggtgggaagtgtaggggtcacgctgggcgtaaccaccacacccgccgcgcttaatggggcgctacagggcgcgtggggatgatccactagtacggattagaagccgccgagcgggtgacagccctccgaaggaagactctcctccgtgcgtcctcgtcttcaccggtcgcgttcctgaaacgcagatgtgcctcgcgccgcactgctccgaacaataaagattctacaatactagcttttatggttatgaagaggaaaaattggcagtaacctggccccacaaaccttcaaatgaacgaatcaaattaacaaccataggatgataatgcgattagttttttagccttatttctggggtaattaatcagcgaagcgatgatttttgatctattaacagatatataaatgcaaaaactgcataaccactttaactaatactttcaacattttcggtttgtattacttcttattcaaatgtaataaaagtatcaacaaaaaattgttaatatacctctatactttaacgtcaaggagaaaaaaccccggatcggactactagcagctgtaatacgactcactatagggaatattaagcttaaacaatgaggcaggtttggttctcttggattgtgggattgttcctatgttttttcaacgtgtcttctgctgctccagtcaacactacaacagaagatgaaacggcacaaattccggctgaagctgtcatcggttactcagatttagaaggggatttcgatgttgctgttttgccattttccaacagcacaaataacgggttattgtttataaatactactattgccagcattgctgctaaagaagaaggggtatctctcgagaaaagagaggctgaagctatgccaagagaaaacttcttgaagtgcttctcccaatatatcccaaacaacgctactaacttaaagttagtttacactcaaaacaatccattatacatgtctgtcttaaactctactattcataacttaagatttacttccgatactacccctaagccattggttatcgtcaccccatctcacgtctcccatatccaaggtactatcttatgttctaagaaggttggtttgcaaatccgtactagatctggtggtcacgactctgaaggtatgtcctatatctctcaagtcccatttgtcattgttgacttaagaaatatgagatccattaaaattgatgttcattctcaaactgcttgggtcgaagctggtgccaccttgggtgaagtttactactgggtcaacgaaaaaaacgaaaacttatctttagctgccggttactgtccaaccgtctgtgctggtggtcatttcggtggtggtggttacggtccattgatgcgtaactacggtttagctgctgacaacattattgacgctcatttagttaatgttcacggtaaggttttggacagaaaatctatgggtgaagatttattttgggccttgagaggtggtggtgctgaatccttcggtatcatcgttgcctggaagattcgtttagttgctgtcccttctaagtccaccatgttctccgtcaagaaaatcatggaaattcatgagttggtcaaattggttaacaagtggcaaaacatcgcttacaagtatgacaaggatttgttgttaatgactcacttcatcacccgtaatatcaccgacaaccaaggtaagaacaaaactgctattcacacctacttctcctccgtttttttgggtggtgtcgactccttagtcgatttgatgaacaaatcctttccagaattgggtattaagaaaactgattgtagacaattgtcttggattgacaccattatcttctattctggtgtcgttaactacgacaccgacaactttaacaaggaaattttgttggatcgttctgctggtcaaaatagggccttcaaaatcaaattggactacgtcaaaaagccaatcccagaatctgttttcgttcaaattttggaaaagttgtacgaagaagacattggtgtgggtatgtatgctttgtatccatatggtggtatcatggacgaaatttccgaatctgccatcccattcccacacagagctggtattttatatgaattgtggtacatctgttcttgggaaaagcaagaagacaacgaaaagcatttaaactggattagaaacatttacaacttcatgaccccatacgtttctaagaacccaagaggcgcctatttgaactaccgtgacttagatattggtattaatgacccaaagaacccaaacaactatactcaagccagaatttggggtgaaaagtacttcggtaagaacttcgatagattagttaaggttaaaactttggtcgatccaaacaacttcttcagaaacgaacaatccatcccaccattgccaagacatcgtcacggccatcatcaccatcaccattagctcgagcatgcatctagagggccgcatcatgtaattagttatgtcacgcttacattcacgccctccccccacatccgctctaaccgaaaaggaaggagttagacaacctgaagtctaggtccctatttatttttttatagttatgttagtattaagaacgttatttatatttcaaatttttcttttttttctgtacagacgcgtgtacgcatgtaacattatactgaaaaccttgcttgagaaggttttgggacgctcgaaggctttaatttgcggccctgcattaatgaatcggccaacgcgcggggagaggcggtttgcgtattgggcgctcttccgcttcctcgctcactgactcgctgcgctcggtcgttcggctgcggcgagcggtatcagctcactcaaaggcggtaatacggttatccacagaatcaggggataacgcaggaaagaacatgtgagcaaaaggccagcaaaagcccaggaaccgtaaaaaggccgcgttgctggcgtttttccataggctccgcccccctgacgagcatcacaaaaatcgacgctcaagtcagaggtggcgaaacccgacaggactataaagataccaggcgtttccccctggaagctccctcgtgcgctctcctgttccgaccctgccgcttaccggatacctgtccgcctttctcccttcgggaagcgtggcgctttctcatagctcacgctgtaggtatctcagttcggtgtaggtcgttcgctccaagctgggctgtgtgcacgaaccccccgttcagcccgaccgctgcgccttatccggtaactatcgtcttgagtccaacccggtaagacacgacttatcgccactggcagcagccactggtaacaggattagcagagcgaggtatgtaggcggtgctacagagttcttgaagtggtggcctaactacggctacactagaagaacagtatttggtatctgcgctctgctgaagccagttaccttcggaaaaagagttggtagctcttgatccggcaaacaaaccaccgctggtagcggtggtttttttgtttgcaagcagcagattacgcgcagaaaaaaaggatctcaagaagatcctttgatcttttctacggggtctgacgctcagtggaacgaaaactcacgttaagggattttggtcatgagattatcaaaaaggatcttcacctagatccttttaaattaaaaatgaagttttaaatcaatctaaagtatatatgagtaaacttggtctgacagttaccaatgcttaatcagtgaggcacctatctcagcgatctgtctatttcgttcatccatagttgcctgactccccgtcgtgtagataactacgatacgggagcgcttaccatctggccccagtgctgcaatgataccgcgagacccacgctcaccggctccagatttatcagcaataaaccagccagccggaagggccgagcgcagaagtggtcctgcaactttatccgcctccattcagtctattaattgttgccgggaagctagagtaagtagttcgccagttaatagtttgcgcaacgttgttggcattgctacaggcatcgtggtgtcactctcgtcgtttggtatggcttcattcagctccggttcccaacgatcaaggcgagttacatgatcccccatgttgtgcaaaaaagcggttagctccttcggtcctccgatcgttgtcagaagtaagttggccgcagtgttatcactcatggttatggcagcactgcataattctcttactgtcatgccatccgtaagatgcttttctgtgactggtgagtactcaaccaagtcattctgagaatagtgtatgcggcgaccgagttgctcttgcccggcgtcaatacgggataatagtgtatcacatagcagaactttaaaagtgctcatcattggaaaacgttcttcggggcgaaaactctcaaggatcttaccgctgttgagatccagttcgatgtaacccactcgtgcacccaactgatcttcagcatcttttactttcaccagcgtttctgggtgagcaaaaacaggaaggcaaaatgccgcaaaaaagggaataagggcgacacggaaatgttgaatactcatactcttcctttttcaatgggtaataactgatataattaaattgaagctctaatttgtgagtttagtatacatgcatttacttataatacagttttttagttttgctggccgcatcttctcaaatatgcttcccagcctgcttttctgtaacgttcaccctctaccttagcatcccttccctttgcaaatagtcctcttccaacaataataatgtcagatcctgtagagaccacatcatccacggttctatactgttgacccaatgcgtctcccttgtcatctaaacccacaccgggtgtcataatcaaccaatcgtaaccttcatctcttccacccatgtctctttgagcaataaagccgataacaaaatctttgtcgctcttcgcaatgtcaacagtacccttagtatattctccagtagatagggagcccttgcatgacaattctgctaacatcaaaaggcctctaggttcctttgttacttcttctgccgcctgcttcaaaccgctaacaatacctgggcccaccacaccgtgtgcattcgtaatgtctgcccattctgctattctgtatacacccgcagagtactgcaatttgactgtattaccaatgtcagcaaattttctgtcttcg

SEQ ID NO: 66 - DNA, 7266 bp, Artificial Sequence
  OXC154-Q349G/A383V/L451G
aagagtaaaaaattgtacttggcggataatgcctttagcggcttaactgtgccctccatggaaaaatcagtcaagatatccacatgtgtttttagtaaacaaattttgggacctaatgcttcaactaactccagtaattccttggtggtacgaacatccaatgaagcacacaagtttgtttgcttttcgtgcatgatattaaatagcttggcagcaacaggactaggatgagtagcagcacgttccttatatgtagctttcgacatgatttatcttcgtttcctgcaggtttttgttctgtgcagttgggttaagaatactgggcaatttcatgtttcttcaacactacatatgcgtatatataccaatctaagtctgtgctccttccttcgttcttccttctgttcggagattaccgaatcaaaaaaatttcaaagaaaccgaaatcaaaaaaaagaataaaaaaaaaatgatgaattgaattgaaaagctagcttatcgatgataagctgtcaaagatgagaattaattccacggactatagactatactagatactccgtctactgtacgatacacttccgctcaggtccttgtcctttaacgaggccttaccactcttttgttactctattgatccagctcagcaaaggcagtgtgatctaagattctatcttcgcgatgtagtaaaactagctagaccgagaaagagactagaaatgcaaaaggcacttctacaatggctgccatcattattatccgatgtgacgctgcagcttctcaatgatattcgaatacgctttgaggagatacagcctaatatccgacaaactgttttacagatttacgatcgtacttgttacccatcattgaattttgaacatccgaacctgggagttttccctgaaacagatagtatatttgaacctgtataataatatatagtctagcgctttacggaagacaatgtatgtatttcggttcctggagaaactattgcatctattgcataggtaatcttgcacgtcgcatccccggttcattttctgcgtttccatcttgcacttcaatagcatatctttgttcgcttgcctgtaacttacacgcgcctcgtatcttttaatgatggaataatttgggaatttactctgtgtttatttatttttatgttttgtatttggattttagaaagtaaataaagaaggtagaagagttacggaatgaagaaaaaaaaataaacaaaggtttaaaaaatttcaacaaaaagcgtactttacatatatatttattagacaagaaaagcagattaaatagatatacattcgattaacgataagtaaaatgtaaaatcacaggattttcgtgtgtggtcttctacacagacaagatgaaacaattcggcattaatacctgagagcaggaagagcaagataaaaggtagtatttgttggcgatccccctagagtcttttacatcttcggaaaacaaaaactattttttctttaatttctttttttactttctatttttaatttatatatttatattaaaaaatttaaattataattatttttatagcacgtgatgaaaaggaccgggaagctccaccccggttgataatcagaaaagccccaaaaacaggaagattgtataagcaaatatttaaattgtaaacgttaatattttgttaaaattcgcgttaaatttttgttaaatcagctcattttttaacgaatagcccgaaatcggcaaaatcccttataaatcaaaagaatagaccgagatagggttgagtgttgttccagtttccaacaagagtccactattaaagaacgtggactccaacgtcaaagggcgaaaaagggtctatcagggcgatggcccactacgtgaaccatcaccctaatcaagttttttggggtcgaggtgccgtaaagcagtaaatcggaagggtaaacggatgcccccatttagagcttgacggggaaagccggcgaacgtggcgagaaaggaagggaagaaagcgaaaggagcgggggctagggcggtgggaagtgtaggggtcacgctgggcgtaaccaccacacccgccgcgcttaatggggcgctacagggcgcgtggggatgatccactagtacggattagaagccgccgagcgggtgacagccctccgaaggaagactctcctccgtgcgtcctcgtcttcaccggtcgcgttcctgaaacgcagatgtgcctcgcgccgcactgctccgaacaataaagattctacaatactagcttttatggttatgaagaggaaaaattggcagtaacctggccccacaaaccttcaaatgaacgaatcaaattaacaaccataggatgataatgcgattagttttttagccttatttctggggtaattaatcagcgaagcgatgatttttgatctattaacagatatataaatgcaaaaactgcataaccactttaactaatactttcaacattttcggtttgtattacttcttattcaaatgtaataaaagtatcaacaaaaaattgttaatatacctctatactttaacgtcaaggagaaaaaaccccggatcggactactagcagctgtaatacgactcactatagggaatattaagcttaaacaatgaggcaggtttggttctcttggattgtgggattgttcctatgttttttcaacgtgtcttctgctgctccagtcaacactacaacagaagatgaaacggcacaaattccggctgaagctgtcatcggttactcagatttagaaggggatttcgatgttgctgttttgccattttccaacagcacaaataacgggttattgtttataaatactactattgccagcattgctgctaaagaagaaggggtatctctcgagaaaagagaggctgaagctatgccaagagaaaacttcttgaagtgcttctcccaatatatcccaaacaacgctactaacttaaagttagtttacactcaaaacaatccattatacatgtctgtcttaaactctactattcataacttaagatttacttccgatactacccctaagccattggttatcgtcaccccatctcacgtctcccatatccaaggtactatcttatgttctaagaaggttggtttgcaaatccgtactagatctggtggtcacgactctgaaggtatgtcctatatctctcaagtcccatttgtcattgttgacttaagaaatatgagatccattaaaattgatgttcattctcaaactgcttgggtcgaagctggtgccaccttgggtgaagtttactactgggtcaacgaaaaaaacgaaaacttatctttagctgccggttactgtccaaccgtctgtgctggtggtcatttcggtggtggtggttacggtccattgatgcgtaactacggtttagctgctgacaacattattgacgctcatttagttaatgttcacggtaaggttttggacagaaaatctatgggtgaagatttattttgggccttgagaggtggtggtgctgaatccttcggtatcatcgttgcctggaagattcgtttagttgctgtcccttctaagtccaccatgttctccgtcaagaaaatcatggaaattcatgagttggtcaaattggttaacaagtggcaaaacatcgcttacaagtatgacaaggatttgttgttaatgactcacttcatcacccgtaatatcaccgacaaccaaggtaagaacaaaactgctattcacacctacttctcctccgtttttttgggtggtgtcgactccttagtcgatttgatgaacaaatcctttccagaattgggtattaagaaaactgattgtagacaattgtcttggattgacaccattatcttctattctggtgtcgttaactacgacaccgacaactttaacaaggaaattttgttggatcgttctgctggtgggaatggtgccttcaaaatcaaattggactacgtcaaaaagccaatcccagaatctgttttcgttcaaattttggaaaagttgtacgaagaagacattggtgtgggtatgtatgctttgtatccatatggtggtatcatggacgaaatttccgaatctgccatcccattcccacacagagctggtattttatatgaattgtggtacatctgttcttgggaaaagcaagaagacaacgaaaagcatttaaactggattagaaacatttacaacttcatgaccccatacgtttctaagaacccaagaggcgcctatttgaactaccgtgacttagatattggtattaatgacccaaagaacccaaacaactatactcaagccagaatttggggtgaaaagtacttcggtaagaacttcgatagattagttaaggttaaaactttggtcgatccaaacaacttcttcagaaacgaacaatccatcccaccattgccaagacatcgtcacggccatcatcaccatcaccattagctcgagcatgcatctagagggccgcatcatgtaattagttatgtcacgcttacattcacgccctccccccacatccgctctaaccgaaaaggaaggagttagacaacctgaagtctaggtccctatttatttttttatagttatgttagtattaagaacgttatttatatttcaaatttttcttttttttctgtacagacgcgtgtacgcatgtaacattatactgaaaaccttgcttgagaaggttttgggacgctcgaaggctttaatttgcggccctgcattaatgaatcggccaacgcgcggggagaggcggtttgcgtattgggcgctcttccgcttcctcgctcactgactcgctgcgctcggtcgttcggctgcggcgagcggtatcagctcactcaaaggcggtaatacggttatccacagaatcaggggataacgcaggaaagaacatgtgagcaaaaggccagcaaaagcccaggaaccgtaaaaaggccgcgttgctggcgtttttccataggctccgcccccctgacgagcatcacaaaaatcgacgctcaagtcagaggtggcgaaacccgacaggactataaagataccaggcgtttccccctggaagctccctcgtgcgctctcctgttccgaccctgccgcttaccggatacctgtccgcctttctcccttcgggaagcgtggcgctttctcatagctcacgctgtaggtatctcagttcggtgtaggtcgttcgctccaagctgggctgtgtgcacgaaccccccgttcagcccgaccgctgcgccttatccggtaactatcgtcttgagtccaacccggtaagacacgacttatcgccactggcagcagccactggtaacaggattagcagagcgaggtatgtaggcggtgctacagagttcttgaagtggtggcctaactacggctacactagaagaacagtatttggtatctgcgctctgctgaagccagttaccttcggaaaaagagttggtagctcttgatccggcaaacaaaccaccgctggtagcggtggtttttttgtttgcaagcagcagattacgcgcagaaaaaaaggatctcaagaagatcctttgatcttttctacggggtctgacgctcagtggaacgaaaactcacgttaagggattttggtcatgagattatcaaaaaggatcttcacctagatccttttaaattaaaaatgaagttttaaatcaatctaaagtatatatgagtaaacttggtctgacagttaccaatgcttaatcagtgaggcacctatctcagcgatctgtctatttcgttcatccatagttgcctgactccccgtcgtgtagataactacgatacgggagcgcttaccatctggccccagtgctgcaatgataccgcgagacccacgctcaccggctccagatttatcagcaataaaccagccagccggaagggccgagcgcagaagtggtcctgcaactttatccgcctccattcagtctattaattgttgccgggaagctagagtaagtagttcgccagttaatagtttgcgcaacgttgttggcattgctacaggcatcgtggtgtcactctcgtcgtttggtatggcttcattcagctccggttcccaacgatcaaggcgagttacatgatcccccatgttgtgcaaaaaagcggttagctccttcggtcctccgatcgttgtcagaagtaagttggccgcagtgttatcactcatggttatggcagcactgcataattctcttactgtcatgccatccgtaagatgcttttctgtgactggtgagtactcaaccaagtcattctgagaatagtgtatgcggcgaccgagttgctcttgcccggcgtcaatacgggataatagtgtatcacatagcagaactttaaaagtgctcatcattggaaaacgttcttcggggcgaaaactctcaaggatcttaccgctgttgagatccagttcgatgtaacccactcgtgcacccaactgatcttcagcatcttttactttcaccagcgtttctgggtgagcaaaaacaggaaggcaaaatgccgcaaaaaagggaataagggcgacacggaaatgttgaatactcatactcttcctttttcaatgggtaataactgatataattaaattgaagctctaatttgtgagtttagtatacatgcatttacttataatacagttttttagttttgctggccgcatcttctcaaatatgcttcccagcctgcttttctgtaacgttcaccctctaccttagcatcccttccctttgcaaatagtcctcttccaacaataataatgtcagatcctgtagagaccacatcatccacggttctatactgttgacccaatgcgtctcccttgtcatctaaacccacaccgggtgtcataatcaaccaatcgtaaccttcatctcttccacccatgtctctttgagcaataaagccgataacaaaatctttgtcgctcttcgcaatgtcaacagtacccttagtatattctccagtagatagggagcccttgcatgacaattctgctaacatcaaaaggcctctaggttcctttgttacttcttctgccgcctgcttcaaaccgctaacaatacctgggcccaccacaccgtgtgcattcgtaatgtctgcccattctgctattctgtatacacccgcagagtactgcaatttgactgtattaccaatgtcagcaaattttctgtcttcg

SEQ ID NO: 67 - DNA, 7266 bp, Artificial Sequence
  OXC154-A383V/L451G
aagagtaaaaaattgtacttggcggataatgcctttagcggcttaactgtgccctccatggaaaaatcagtcaagatatccacatgtgtttttagtaaacaaattttgggacctaatgcttcaactaactccagtaattccttggtggtacgaacatccaatgaagcacacaagtttgtttgcttttcgtgcatgatattaaatagcttggcagcaacaggactaggatgagtagcagcacgttccttatatgtagctttcgacatgatttatcttcgtttcctgcaggtttttgttctgtgcagttgggttaagaatactgggcaatttcatgtttcttcaacactacatatgcgtatatataccaatctaagtctgtgctccttccttcgttcttccttctgttcggagattaccgaatcaaaaaaatttcaaagaaaccgaaatcaaaaaaaagaataaaaaaaaaatgatgaattgaattgaaaagctagcttatcgatgataagctgtcaaagatgagaattaattccacggactatagactatactagatactccgtctactgtacgatacacttccgctcaggtccttgtcctttaacgaggccttaccactcttttgttactctattgatccagctcagcaaaggcagtgtgatctaagattctatcttcgcgatgtagtaaaactagctagaccgagaaagagactagaaatgcaaaaggcacttctacaatggctgccatcattattatccgatgtgacgctgcagcttctcaatgatattcgaatacgctttgaggagatacagcctaatatccgacaaactgttttacagatttacgatcgtacttgttacccatcattgaattttgaacatccgaacctgggagttttccctgaaacagatagtatatttgaacctgtataataatatatagtctagcgctttacggaagacaatgtatgtatttcggttcctggagaaactattgcatctattgcataggtaatcttgcacgtcgcatccccggttcattttctgcgtttccatcttgcacttcaatagcatatctttgttcgcttgcctgtaacttacacgcgcctcgtatcttttaatgatggaataatttgggaatttactctgtgtttatttatttttatgttttgtatttggattttagaaagtaaataaagaaggtagaagagttacggaatgaagaaaaaaaaataaacaaaggtttaaaaaatttcaacaaaaagcgtactttacatatatatttattagacaagaaaagcagattaaatagatatacattcgattaacgataagtaaaatgtaaaatcacaggattttcgtgtgtggtcttctacacagacaagatgaaacaattcggcattaatacctgagagcaggaagagcaagataaaaggtagtatttgttggcgatccccctagagtcttttacatcttcggaaaacaaaaactattttttctttaatttctttttttactttctatttttaatttatatatttatattaaaaaatttaaattataattatttttatagcacgtgatgaaaaggaccgggaagctccaccccggttgataatcagaaaagccccaaaaacaggaagattgtataagcaaatatttaaattgtaaacgttaatattttgttaaaattcgcgttaaatttttgttaaatcagctcattttttaacgaatagcccgaaatcggcaaaatcccttataaatcaaaagaatagaccgagatagggttgagtgttgttccagtttccaacaagagtccactattaaagaacgtggactccaacgtcaaagggcgaaaaagggtctatcagggcgatggcccactacgtgaaccatcaccctaatcaagttttttggggtcgaggtgccgtaaagcagtaaatcggaagggtaaacggatgcccccatttagagcttgacggggaaagccggcgaacgtggcgagaaaggaagggaagaaagcgaaaggagcgggggctagggcggtgggaagtgtaggggtcacgctgggcgtaaccaccacacccgccgcgcttaatggggcgctacagggcgcgtggggatgatccactagtacggattagaagccgccgagcgggtgacagccctccgaaggaagactctcctccgtgcgtcctcgtcttcaccggtcgcgttcctgaaacgcagatgtgcctcgcgccgcactgctccgaacaataaagattctacaatactagcttttatggttatgaagaggaaaaattggcagtaacctggccccacaaaccttcaaatgaacgaatcaaattaacaaccataggatgataatgcgattagttttttagccttatttctggggtaattaatcagcgaagcgatgatttttgatctattaacagatatataaatgcaaaaactgcataaccactttaactaatactttcaacattttcggtttgtattacttcttattcaaatgtaataaaagtatcaacaaaaaattgttaatatacctctatactttaacgtcaaggagaaaaaaccccggatcggactactagcagctgtaatacgactcactatagggaatattaagcttaaacaatgaggcaggtttggttctcttggattgtgggattgttcctatgttttttcaacgtgtcttctgctgctccagtcaacactacaacagaagatgaaacggcacaaattccggctgaagctgtcatcggttactcagatttagaaggggatttcgatgttgctgttttgccattttccaacagcacaaataacgggttattgtttataaatactactattgccagcattgctgctaaagaagaaggggtatctctcgagaaaagagaggctgaagctatgccaagagaaaacttcttgaagtgcttctcccaatatatcccaaacaacgctactaacttaaagttagtttacactcaaaacaatccattatacatgtctgtcttaaactctactattcataacttaagatttacttccgatactacccctaagccattggttatcgtcaccccatctcacgtctcccatatccaaggtactatcttatgttctaagaaggttggtttgcaaatccgtactagatctggtggtcacgactctgaaggtatgtcctatatctctcaagtcccatttgtcattgttgacttaagaaatatgagatccattaaaattgatgttcattctcaaactgcttgggtcgaagctggtgccaccttgggtgaagtttactactgggtcaacgaaaaaaacgaaaacttatctttagctgccggttactgtccaaccgtctgtgctggtggtcatttcggtggtggtggttacggtccattgatgcgtaactacggtttagctgctgacaacattattgacgctcatttagttaatgttcacggtaaggttttggacagaaaatctatgggtgaagatttattttgggccttgagaggtggtggtgctgaatccttcggtatcatcgttgcctggaagattcgtttagttgctgtcccttctaagtccaccatgttctccgtcaagaaaatcatggaaattcatgagttggtcaaattggttaacaagtggcaaaacatcgcttacaagtatgacaaggatttgttgttaatgactcacttcatcacccgtaatatcaccgacaaccaaggtaagaacaaaactgctattcacacctacttctcctccgtttttttgggtggtgtcgactccttagtcgatttgatgaacaaatcctttccagaattgggtattaagaaaactgattgtagacaattgtcttggattgacaccattatcttctattctggtgtcgttaactacgacaccgacaactttaacaaggaaattttgttggatcgttctgctggtcaaaatggtgccttcaaaatcaaattggactacgtcaaaaagccaatcccagaatctgttttcgttcaaattttggaaaagttgtacgaagaagacattggtgtgggtatgtatgctttgtatccatatggtggtatcatggacgaaatttccgaatctgccatcccattcccacacagagctggtattttatatgaattgtggtacatctgttcttgggaaaagcaagaagacaacgaaaagcatttaaactggattagaaacatttacaacttcatgaccccatacgtttctaagaacccaagaggcgcctatttgaactaccgtgacttagatattggtattaatgacccaaagaacccaaacaactatactcaagccagaatttggggtgaaaagtacttcggtaagaacttcgatagattagttaaggttaaaactttggtcgatccaaacaacttcttcagaaacgaacaatccatcccaccattgccaagacatcgtcacggccatcatcaccatcaccattagctcgagcatgcatctagagggccgcatcatgtaattagttatgtcacgcttacattcacgccctccccccacatccgctctaaccgaaaaggaaggagttagacaacctgaagtctaggtccctatttatttttttatagttatgttagtattaagaacgttatttatatttcaaatttttcttttttttctgtacagacgcgtgtacgcatgtaacattatactgaaaaccttgcttgagaaggttttgggacgctcgaaggctttaatttgcggccctgcattaatgaatcggccaacgcgcggggagaggcggtttgcgtattgggcgctcttccgcttcctcgctcactgactcgctgcgctcggtcgttcggctgcggcgagcggtatcagctcactcaaaggcggtaatacggttatccacagaatcaggggataacgcaggaaagaacatgtgagcaaaaggccagcaaaagcccaggaaccgtaaaaaggccgcgttgctggcgtttttccataggctccgcccccctgacgagcatcacaaaaatcgacgctcaagtcagaggtggcgaaacccgacaggactataaagataccaggcgtttccccctggaagctccctcgtgcgctctcctgttccgaccctgccgcttaccggatacctgtccgcctttctcccttcgggaagcgtggcgctttctcatagctcacgctgtaggtatctcagttcggtgtaggtcgttcgctccaagctgggctgtgtgcacgaaccccccgttcagcccgaccgctgcgccttatccggtaactatcgtcttgagtccaacccggtaagacacgacttatcgccactggcagcagccactggtaacaggattagcagagcgaggtatgtaggcggtgctacagagttcttgaagtggtggcctaactacggctacactagaagaacagtatttggtatctgcgctctgctgaagccagttaccttcggaaaaagagttggtagctcttgatccggcaaacaaaccaccgctggtagcggtggtttttttgtttgcaagcagcagattacgcgcagaaaaaaaggatctcaagaagatcctttgatcttttctacggggtctgacgctcagtggaacgaaaactcacgttaagggattttggtcatgagattatcaaaaaggatcttcacctagatccttttaaattaaaaatgaagttttaaatcaatctaaagtatatatgagtaaacttggtctgacagttaccaatgcttaatcagtgaggcacctatctcagcgatctgtctatttcgttcatccatagttgcctgactccccgtcgtgtagataactacgatacgggagcgcttaccatctggccccagtgctgcaatgataccgcgagacccacgctcaccggctccagatttatcagcaataaaccagccagccggaagggccgagcgcagaagtggtcctgcaactttatccgcctccattcagtctattaattgttgccgggaagctagagtaagtagttcgccagttaatagtttgcgcaacgttgttggcattgctacaggcatcgtggtgtcactctcgtcgtttggtatggcttcattcagctccggttcccaacgatcaaggcgagttacatgatcccccatgttgtgcaaaaaagcggttagctccttcggtcctccgatcgttgtcagaagtaagttggccgcagtgttatcactcatggttatggcagcactgcataattctcttactgtcatgccatccgtaagatgcttttctgtgactggtgagtactcaaccaagtcattctgagaatagtgtatgcggcgaccgagttgctcttgcccggcgtcaatacgggataatagtgtatcacatagcagaactttaaaagtgctcatcattggaaaacgttcttcggggcgaaaactctcaaggatcttaccgctgttgagatccagttcgatgtaacccactcgtgcacccaactgatcttcagcatcttttactttcaccagcgtttctgggtgagcaaaaacaggaaggcaaaatgccgcaaaaaagggaataagggcgacacggaaatgttgaatactcatactcttcctttttcaatgggtaataactgatataattaaattgaagctctaatttgtgagtttagtatacatgcatttacttataatacagttttttagttttgctggccgcatcttctcaaatatgcttcccagcctgcttttctgtaacgttcaccctctaccttagcatcccttccctttgcaaatagtcctcttccaacaataataatgtcagatcctgtagagaccacatcatccacggttctatactgttgacccaatgcgtctcccttgtcatctaaacccacaccgggtgtcataatcaaccaatcgtaaccttcatctcttccacccatgtctctttgagcaataaagccgataacaaaatctttgtcgctcttcgcaatgtcaacagtacccttagtatattctccagtagatagggagcccttgcatgacaattctgctaacatcaaaaggcctctaggttcctttgttacttcttctgccgcctgcttcaaaccgctaacaatacctgggcccaccacaccgtgtgcattcgtaatgtctgcccattctgctattctgtatacacccgcagagtactgcaatttgactgtattaccaatgtcagcaaattttctgtcttcg

SEQ ID NO: 68 - DNA, 7266 bp, Artificial Sequence
  OXC154-N331G/Q349G
aagagtaaaaaattgtacttggcggataatgcctttagcggcttaactgtgccctccatggaaaaatcagtcaagatatccacatgtgtttttagtaaacaaattttgggacctaatgcttcaactaactccagtaattccttggtggtacgaacatccaatgaagcacacaagtttgtttgcttttcgtgcatgatattaaatagcttggcagcaacaggactaggatgagtagcagcacgttccttatatgtagctttcgacatgatttatcttcgtttcctgcaggtttttgttctgtgcagttgggttaagaatactgggcaatttcatgtttcttcaacactacatatgcgtatatataccaatctaagtctgtgctccttccttcgttcttccttctgttcggagattaccgaatcaaaaaaatttcaaagaaaccgaaatcaaaaaaaagaataaaaaaaaaatgatgaattgaattgaaaagctagcttatcgatgataagctgtcaaagatgagaattaattccacggactatagactatactagatactccgtctactgtacgatacacttccgctcaggtccttgtcctttaacgaggccttaccactcttttgttactctattgatccagctcagcaaaggcagtgtgatctaagattctatcttcgcgatgtagtaaaactagctagaccgagaaagagactagaaatgcaaaaggcacttctacaatggctgccatcattattatccgatgtgacgctgcagcttctcaatgatattcgaatacgctttgaggagatacagcctaatatccgacaaactgttttacagatttacgatcgtacttgttacccatcattgaattttgaacatccgaacctgggagttttccctgaaacagatagtatatttgaacctgtataataatatatagtctagcgctttacggaagacaatgtatgtatttcggttcctggagaaactattgcatctattgcataggtaatcttgcacgtcgcatccccggttcattttctgcgtttccatcttgcacttcaatagcatatctttgttcgcttgcctgtaacttacacgcgcctcgtatcttttaatgatggaataatttgggaatttactctgtgtttatttatttttatgttttgtatttggattttagaaagtaaataaagaaggtagaagagttacggaatgaagaaaaaaaaataaacaaaggtttaaaaaatttcaacaaaaagcgtactttacatatatatttattagacaagaaaagcagattaaatagatatacattcgattaacgataagtaaaatgtaaaatcacaggattttcgtgtgtggtcttctacacagacaagatgaaacaattcggcattaatacctgagagcaggaagagcaagataaaaggtagtatttgttggcgatccccctagagtcttttacatcttcggaaaacaaaaactattttttctttaatttctttttttactttctatttttaatttatatatttatattaaaaaatttaaattataattatttttatagcacgtgatgaaaaggaccgggaagctccaccccggttgataatcagaaaagccccaaaaacaggaagattgtataagcaaatatttaaattgtaaacgttaatattttgttaaaattcgcgttaaatttttgttaaatcagctcattttttaacgaatagcccgaaatcggcaaaatcccttataaatcaaaagaatagaccgagatagggttgagtgttgttccagtttccaacaagagtccactattaaagaacgtggactccaacgtcaaagggcgaaaaagggtctatcagggcgatggcccactacgtgaaccatcaccctaatcaagttttttggggtcgaggtgccgtaaagcagtaaatcggaagggtaaacggatgcccccatttagagcttgacggggaaagccggcgaacgtggcgagaaaggaagggaagaaagcgaaaggagcgggggctagggcggtgggaagtgtaggggtcacgctgggcgtaaccaccacacccgccgcgcttaatggggcgctacagggcgcgtggggatgatccactagtacggattagaagccgccgagcgggtgacagccctccgaaggaagactctcctccgtgcgtcctcgtcttcaccggtcgcgttcctgaaacgcagatgtgcctcgcgccgcactgctccgaacaataaagattctacaatactagcttttatggttatgaagaggaaaaattggcagtaacctggccccacaaaccttcaaatgaacgaatcaaattaacaaccataggatgataatgcgattagttttttagccttatttctggggtaattaatcagcgaagcgatgatttttgatctattaacagatatataaatgcaaaaactgcataaccactttaactaatactttcaacattttcggtttgtattacttcttattcaaatgtaataaaagtatcaacaaaaaattgttaatatacctctatactttaacgtcaaggagaaaaaaccccggatcggactactagcagctgtaatacgactcactatagggaatattaagcttaaacaatgaggcaggtttggttctcttggattgtgggattgttcctatgttttttcaacgtgtcttctgctgctccagtcaacactacaacagaagatgaaacggcacaaattccggctgaagctgtcatcggttactcagatttagaaggggatttcgatgttgctgttttgccattttccaacagcacaaataacgggttattgtttataaatactactattgccagcattgctgctaaagaagaaggggtatctctcgagaaaagagaggctgaagctatgccaagagaaaacttcttgaagtgcttctcccaatatatcccaaacaacgctactaacttaaagttagtttacactcaaaacaatccattatacatgtctgtcttaaactctactattcataacttaagatttacttccgatactacccctaagccattggttatcgtcaccccatctcacgtctcccatatccaaggtactatcttatgttctaagaaggttggtttgcaaatccgtactagatctggtggtcacgactctgaaggtatgtcctatatctctcaagtcccatttgtcattgttgacttaagaaatatgagatccattaaaattgatgttcattctcaaactgcttgggtcgaagctggtgccaccttgggtgaagtttactactgggtcaacgaaaaaaacgaaaacttatctttagctgccggttactgtccaaccgtctgtgctggtggtcatttcggtggtggtggttacggtccattgatgcgtaactacggtttagctgctgacaacattattgacgctcatttagttaatgttcacggtaaggttttggacagaaaatctatgggtgaagatttattttgggccttgagaggtggtggtgctgaatccttcggtatcatcgttgcctggaagattcgtttagttgctgtcccttctaagtccaccatgttctccgtcaagaaaatcatggaaattcatgagttggtcaaattggttaacaagtggcaaaacatcgcttacaagtatgacaaggatttgttgttaatgactcacttcatcacccgtaatatcaccgacaaccaaggtaagaacaaaactgctattcacacctacttctcctccgtttttttgggtggtgtcgactccttagtcgatttgatgaacaaatcctttccagaattgggtattaagaaaactgattgtagacaattgtcttggattgacaccattatcttctattctggtgtcgttgggtacgacaccgacaactttaacaaggaaattttgttggatcgttctgctggtgggaatggtgccttcaaaatcaaattggactacgtcaaaaagccaatcccagaatctgttttcgttcaaattttggaaaagttgtacgaagaagacattggtgccggtatgtatgctttgtatccatatggtggtatcatggacgaaatttccgaatctgccatcccattcccacacagagctggtattttatatgaattgtggtacatctgttcttgggaaaagcaagaagacaacgaaaagcatttaaactggattagaaacatttacaacttcatgaccccatacgtttctaagaacccaagattagcctatttgaactaccgtgacttagatattggtattaatgacccaaagaacccaaacaactatactcaagccagaatttggggtgaaaagtacttcggtaagaacttcgatagattagttaaggttaaaactttggtcgatccaaacaacttcttcagaaacgaacaatccatcccaccattgccaagacatcgtcacggccatcatcaccatcaccattagctcgagcatgcatctagagggccgcatcatgtaattagttatgtcacgcttacattcacgccctccccccacatccgctctaaccgaaaaggaaggagttagacaacctgaagtctaggtccctatttatttttttatagttatgttagtattaagaacgttatttatatttcaaatttttcttttttttctgtacagacgcgtgtacgcatgtaacattatactgaaaaccttgcttgagaaggttttgggacgctcgaaggctttaatttgcggccctgcattaatgaatcggccaacgcgcggggagaggcggtttgcgtattgggcgctcttccgcttcctcgctcactgactcgctgcgctcggtcgttcggctgcggcgagcggtatcagctcactcaaaggcggtaatacggttatccacagaatcaggggataacgcaggaaagaacatgtgagcaaaaggccagcaaaagcccaggaaccgtaaaaaggccgcgttgctggcgtttttccataggctccgcccccctgacgagcatcacaaaaatcgacgctcaagtcagaggtggcgaaacccgacaggactataaagataccaggcgtttccccctggaagctccctcgtgcgctctcctgttccgaccctgccgcttaccggatacctgtccgcctttctcccttcgggaagcgtggcgctttctcatagctcacgctgtaggtatctcagttcggtgtaggtcgttcgctccaagctgggctgtgtgcacgaaccccccgttcagcccgaccgctgcgccttatccggtaactatcgtcttgagtccaacccggtaagacacgacttatcgccactggcagcagccactggtaacaggattagcagagcgaggtatgtaggcggtgctacagagttcttgaagtggtggcctaactacggctacactagaagaacagtatttggtatctgcgctctgctgaagccagttaccttcggaaaaagagttggtagctcttgatccggcaaacaaaccaccgctggtagcggtggtttttttgtttgcaagcagcagattacgcgcagaaaaaaaggatctcaagaagatcctttgatcttttctacggggtctgacgctcagtggaacgaaaactcacgttaagggattttggtcatgagattatcaaaaaggatcttcacctagatccttttaaattaaaaatgaagttttaaatcaatctaaagtatatatgagtaaacttggtctgacagttaccaatgcttaatcagtgaggcacctatctcagcgatctgtctatttcgttcatccatagttgcctgactccccgtcgtgtagataactacgatacgggagcgcttaccatctggccccagtgctgcaatgataccgcgagacccacgctcaccggctccagatttatcagcaataaaccagccagccggaagggccgagcgcagaagtggtcctgcaactttatccgcctccattcagtctattaattgttgccgggaagctagagtaagtagttcgccagttaatagtttgcgcaacgttgttggcattgctacaggcatcgtggtgtcactctcgtcgtttggtatggcttcattcagctccggttcccaacgatcaaggcgagttacatgatcccccatgttgtgcaaaaaagcggttagctccttcggtcctccgatcgttgtcagaagtaagttggccgcagtgttatcactcatggttatggcagcactgcataattctcttactgtcatgccatccgtaagatgcttttctgtgactggtgagtactcaaccaagtcattctgagaatagtgtatgcggcgaccgagttgctcttgcccggcgtcaatacgggataatagtgtatcacatagcagaactttaaaagtgctcatcattggaaaacgttcttcggggcgaaaactctcaaggatcttaccgctgttgagatccagttcgatgtaacccactcgtgcacccaactgatcttcagcatcttttactttcaccagcgtttctgggtgagcaaaaacaggaaggcaaaatgccgcaaaaaagggaataagggcgacacggaaatgttgaatactcatactcttcctttttcaatgggtaataactgatataattaaattgaagctctaatttgtgagtttagtatacatgcatttacttataatacagttttttagttttgctggccgcatcttctcaaatatgcttcccagcctgcttttctgtaacgttcaccctctaccttagcatcccttccctttgcaaatagtcctcttccaacaataataatgtcagatcctgtagagaccacatcatccacggttctatactgttgacccaatgcgtctcccttgtcatctaaacccacaccgggtgtcataatcaaccaatcgtaaccttcatctcttccacccatgtctctttgagcaataaagccgataacaaaatctttgtcgctcttcgcaatgtcaacagtacccttagtatattctccagtagatagggagcccttgcatgacaattctgctaacatcaaaaggcctctaggttcctttgttacttcttctgccgcctgcttcaaaccgctaacaatacctgggcccaccacaccgtgtgcattcgtaatgtctgcccattctgctattctgtatacacccgcagagtactgcaatttgactgtattaccaatgtcagcaaattttctgtcttcg

SEQ ID NO: 69 - DNA, 7266 bp, Artificial Sequence
  OXC154-G351I
aagagtaaaaaattgtacttggcggataatgcctttagcggcttaactgtgccctccatggaaaaatcagtcaagatatccacatgtgtttttagtaaacaaattttgggacctaatgcttcaactaactccagtaattccttggtggtacgaacatccaatgaagcacacaagtttgtttgcttttcgtgcatgatattaaatagcttggcagcaacaggactaggatgagtagcagcacgttccttatatgtagctttcgacatgatttatcttcgtttcctgcaggtttttgttctgtgcagttgggttaagaatactgggcaatttcatgtttcttcaacactacatatgcgtatatataccaatctaagtctgtgctccttccttcgttcttccttctgttcggagattaccgaatcaaaaaaatttcaaagaaaccgaaatcaaaaaaaagaataaaaaaaaaatgatgaattgaattgaaaagctagcttatcgatgataagctgtcaaagatgagaattaattccacggactatagactatactagatactccgtctactgtacgatacacttccgctcaggtccttgtcctttaacgaggccttaccactcttttgttactctattgatccagctcagcaaaggcagtgtgatctaagattctatcttcgcgatgtagtaaaactagctagaccgagaaagagactagaaatgcaaaaggcacttctacaatggctgccatcattattatccgatgtgacgctgcagcttctcaatgatattcgaatacgctttgaggagatacagcctaatatccgacaaactgttttacagatttacgatcgtacttgttacccatcattgaattttgaacatccgaacctgggagttttccctgaaacagatagtatatttgaacctgtataataatatatagtctagcgctttacggaagacaatgtatgtatttcggttcctggagaaactattgcatctattgcataggtaatcttgcacgtcgcatccccggttcattttctgcgtttccatcttgcacttcaatagcatatctttgttcgcttgcctgtaacttacacgcgcctcgtatcttttaatgatggaataatttgggaatttactctgtgtttatttatttttatgttttgtatttggattttagaaagtaaataaagaaggtagaagagttacggaatgaagaaaaaaaaataaacaaaggtttaaaaaatttcaacaaaaagcgtactttacatatatatttattagacaagaaaagcagattaaatagatatacattcgattaacgataagtaaaatgtaaaatcacaggattttcgtgtgtggtcttctacacagacaagatgaaacaattcggcattaatacctgagagcaggaagagcaagataaaaggtagtatttgttggcgatccccctagagtcttttacatcttcggaaaacaaaaactattttttctttaatttctttttttactttctatttttaatttatatatttatattaaaaaatttaaattataattatttttatagcacgtgatgaaaaggaccgggaagctccaccccggttgataatcagaaaagccccaaaaacaggaagattgtataagcaaatatttaaattgtaaacgttaatattttgttaaaattcgcgttaaatttttgttaaatcagctcattttttaacgaatagcccgaaatcggcaaaatcccttataaatcaaaagaatagaccgagatagggttgagtgttgttccagtttccaacaagagtccactattaaagaacgtggactccaacgtcaaagggcgaaaaagggtctatcagggcgatggcccactacgtgaaccatcaccctaatcaagttttttggggtcgaggtgccgtaaagcagtaaatcggaagggtaaacggatgcccccatttagagcttgacggggaaagccggcgaacgtggcgagaaaggaagggaagaaagcgaaaggagcgggggctagggcggtgggaagtgtaggggtcacgctgggcgtaaccaccacacccgccgcgcttaatggggcgctacagggcgcgtggggatgatccactagtacggattagaagccgccgagcgggtgacagccctccgaaggaagactctcctccgtgcgtcctcgtcttcaccggtcgcgttcctgaaacgcagatgtgcctcgcgccgcactgctccgaacaataaagattctacaatactagcttttatggttatgaagaggaaaaattggcagtaacctggccccacaaaccttcaaatgaacgaatcaaattaacaaccataggatgataatgcgattagttttttagccttatttctggggtaattaatcagcgaagcgatgatttttgatctattaacagatatataaatgcaaaaactgcataaccactttaactaatactttcaacattttcggtttgtattacttcttattcaaatgtaataaaagtatcaacaaaaaattgttaatatacctctatactttaacgtcaaggagaaaaaaccccggatcggactactagcagctgtaatacgactcactatagggaatattaagcttaaacaatgaggcaggtttggttctcttggattgtgggattgttcctatgttttttcaacgtgtcttctgctgctccagtcaacactacaacagaagatgaaacggcacaaattccggctgaagctgtcatcggttactcagatttagaaggggatttcgatgttgctgttttgccattttccaacagcacaaataacgggttattgtttataaatactactattgccagcattgctgctaaagaagaaggggtatctctcgagaaaagagaggctgaagctatgccaagagaaaacttcttgaagtgcttctcccaatatatcccaaacaacgctactaacttaaagttagtttacactcaaaacaatccattatacatgtctgtcttaaactctactattcataacttaagatttacttccgatactacccctaagccattggttatcgtcaccccatctcacgtctcccatatccaaggtactatcttatgttctaagaaggttggtttgcaaatccgtactagatctggtggtcacgactctgaaggtatgtcctatatctctcaagtcccatttgtcattgttgacttaagaaatatgagatccattaaaattgatgttcattctcaaactgcttgggtcgaagctggtgccaccttgggtgaagtttactactgggtcaacgaaaaaaacgaaaacttatctttagctgccggttactgtccaaccgtctgtgctggtggtcatttcggtggtggtggttacggtccattgatgcgtaactacggtttagctgctgacaacattattgacgctcatttagttaatgttcacggtaaggttttggacagaaaatctatgggtgaagatttattttgggccttgagaggtggtggtgctgaatccttcggtatcatcgttgcctggaagattcgtttagttgctgtcccttctaagtccaccatgttctccgtcaagaaaatcatggaaattcatgagttggtcaaattggttaacaagtggcaaaacatcgcttacaagtatgacaaggatttgttgttaatgactcacttcatcacccgtaatatcaccgacaaccaaggtaagaacaaaactgctattcacacctacttctcctccgtttttttgggtggtgtcgactccttagtcgatttgatgaacaaatcctttccagaattgggtattaagaaaactgattgtagacaattgtcttggattgacaccattatcttctattctggtgtcgttaactacgacaccgacaactttaacaaggaaattttgttggatcgttctgctggtcaaaatatcgccttcaaaatcaaattggactacgtcaaaaagccaatcccagaatctgttttcgttcaaattttggaaaagttgtacgaagaagacattggtgccggtatgtatgctttgtatccatatggtggtatcatggacgaaatttccgaatctgccatcccattcccacacagagctggtattttatatgaattgtggtacatctgttcttgggaaaagcaagaagacaacgaaaagcatttaaactggattagaaacatttacaacttcatgaccccatacgtttctaagaacccaagattagcctatttgaactaccgtgacttagatattggtattaatgacccaaagaacccaaacaactatactcaagccagaatttggggtgaaaagtacttcggtaagaacttcgatagattagttaaggttaaaactttggtcgatccaaacaacttcttcagaaacgaacaatccatcccaccattgccaagacatcgtcacggccatcatcaccatcaccattagctcgagcatgcatctagagggccgcatcatgtaattagttatgtcacgcttacattcacgccctccccccacatccgctctaaccgaaaaggaaggagttagacaacctgaagtctaggtccctatttatttttttatagttatgttagtattaagaacgttatttatatttcaaatttttcttttttttctgtacagacgcgtgtacgcatgtaacattatactgaaaaccttgcttgagaaggttttgggacgctcgaaggctttaatttgcggccctgcattaatgaatcggccaacgcgcggggagaggcggtttgcgtattgggcgctcttccgcttcctcgctcactgactcgctgcgctcggtcgttcggctgcggcgagcggtatcagctcactcaaaggcggtaatacggttatccacagaatcaggggataacgcaggaaagaacatgtgagcaaaaggccagcaaaagcccaggaaccgtaaaaaggccgcgttgctggcgtttttccataggctccgcccccctgacgagcatcacaaaaatcgacgctcaagtcagaggtggcgaaacccgacaggactataaagataccaggcgtttccccctggaagctccctcgtgcgctctcctgttccgaccctgccgcttaccggatacctgtccgcctttctcccttcgggaagcgtggcgctttctcatagctcacgctgtaggtatctcagttcggtgtaggtcgttcgctccaagctgggctgtgtgcacgaaccccccgttcagcccgaccgctgcgccttatccggtaactatcgtcttgagtccaacccggtaagacacgacttatcgccactggcagcagccactggtaacaggattagcagagcgaggtatgtaggcggtgctacagagttcttgaagtggtggcctaactacggctacactagaagaacagtatttggtatctgcgctctgctgaagccagttaccttcggaaaaagagttggtagctcttgatccggcaaacaaaccaccgctggtagcggtggtttttttgtttgcaagcagcagattacgcgcagaaaaaaaggatctcaagaagatcctttgatcttttctacggggtctgacgctcagtggaacgaaaactcacgttaagggattttggtcatgagattatcaaaaaggatcttcacctagatccttttaaattaaaaatgaagttttaaatcaatctaaagtatatatgagtaaacttggtctgacagttaccaatgcttaatcagtgaggcacctatctcagcgatctgtctatttcgttcatccatagttgcctgactccccgtcgtgtagataactacgatacgggagcgcttaccatctggccccagtgctgcaatgataccgcgagacccacgctcaccggctccagatttatcagcaataaaccagccagccggaagggccgagcgcagaagtggtcctgcaactttatccgcctccattcagtctattaattgttgccgggaagctagagtaagtagttcgccagttaatagtttgcgcaacgttgttggcattgctacaggcatcgtggtgtcactctcgtcgtttggtatggcttcattcagctccggttcccaacgatcaaggcgagttacatgatcccccatgttgtgcaaaaaagcggttagctccttcggtcctccgatcgttgtcagaagtaagttggccgcagtgttatcactcatggttatggcagcactgcataattctcttactgtcatgccatccgtaagatgcttttctgtgactggtgagtactcaaccaagtcattctgagaatagtgtatgcggcgaccgagttgctcttgcccggcgtcaatacgggataatagtgtatcacatagcagaactttaaaagtgctcatcattggaaaacgttcttcggggcgaaaactctcaaggatcttaccgctgttgagatccagttcgatgtaacccactcgtgcacccaactgatcttcagcatcttttactttcaccagcgtttctgggtgagcaaaaacaggaaggcaaaatgccgcaaaaaagggaataagggcgacacggaaatgttgaatactcatactcttcctttttcaatgggtaataactgatataattaaattgaagctctaatttgtgagtttagtatacatgcatttacttataatacagttttttagttttgctggccgcatcttctcaaatatgcttcccagcctgcttttctgtaacgttcaccctctaccttagcatcccttccctttgcaaatagtcctcttccaacaataataatgtcagatcctgtagagaccacatcatccacggttctatactgttgacccaatgcgtctcccttgtcatctaaacccacaccgggtgtcataatcaaccaatcgtaaccttcatctcttccacccatgtctctttgagcaataaagccgataacaaaatctttgtcgctcttcgcaatgtcaacagtacccttagtatattctccagtagatagggagcccttgcatgacaattctgctaacatcaaaaggcctctaggttcctttgttacttcttctgccgcctgcttcaaaccgctaacaatacctgggcccaccacaccgtgtgcattcgtaatgtctgcccattctgctattctgtatacacccgcagagtactgcaatttgactgtattaccaatgtcagcaaattttctgtcttcg

SEQ ID NO: 70 - DNA, 7266 bp, Artificial Sequence
  OXC154-L451G
aagagtaaaaaattgtacttggcggataatgcctttagcggcttaactgtgccctccatggaaaaatcagtcaagatatccacatgtgtttttagtaaacaaattttgggacctaatgcttcaactaactccagtaattccttggtggtacgaacatccaatgaagcacacaagtttgtttgcttttcgtgcatgatattaaatagcttggcagcaacaggactaggatgagtagcagcacgttccttatatgtagctttcgacatgatttatcttcgtttcctgcaggtttttgttctgtgcagttgggttaagaatactgggcaatttcatgtttcttcaacactacatatgcgtatatataccaatctaagtctgtgctccttccttcgttcttccttctgttcggagattaccgaatcaaaaaaatttcaaagaaaccgaaatcaaaaaaaagaataaaaaaaaaatgatgaattgaattgaaaagctagcttatcgatgataagctgtcaaagatgagaattaattccacggactatagactatactagatactccgtctactgtacgatacacttccgctcaggtccttgtcctttaacgaggccttaccactcttttgttactctattgatccagctcagcaaaggcagtgtgatctaagattctatcttcgcgatgtagtaaaactagctagaccgagaaagagactagaaatgcaaaaggcacttctacaatggctgccatcattattatccgatgtgacgctgcagcttctcaatgatattcgaatacgctttgaggagatacagcctaatatccgacaaactgttttacagatttacgatcgtacttgttacccatcattgaattttgaacatccgaacctgggagttttccctgaaacagatagtatatttgaacctgtataataatatatagtctagcgctttacggaagacaatgtatgtatttcggttcctggagaaactattgcatctattgcataggtaatcttgcacgtcgcatccccggttcattttctgcgtttccatcttgcacttcaatagcatatctttgttcgcttgcctgtaacttacacgcgcctcgtatcttttaatgatggaataatttgggaatttactctgtgtttatttatttttatgttttgtatttggattttagaaagtaaataaagaaggtagaagagttacggaatgaagaaaaaaaaataaacaaaggtttaaaaaatttcaacaaaaagcgtactttacatatatatttattagacaagaaaagcagattaaatagatatacattcgattaacgataagtaaaatgtaaaatcacaggattttcgtgtgtggtcttctacacagacaagatgaaacaattcggcattaatacctgagagcaggaagagcaagataaaaggtagtatttgttggcgatccccctagagtcttttacatcttcggaaaacaaaaactattttttctttaatttctttttttactttctatttttaatttatatatttatattaaaaaatttaaattataattatttttatagcacgtgatgaaaaggaccgggaagctccaccccggttgataatcagaaaagccccaaaaacaggaagattgtataagcaaatatttaaattgtaaacgttaatattttgttaaaattcgcgttaaatttttgttaaatcagctcattttttaacgaatagcccgaaatcggcaaaatcccttataaatcaaaagaatagaccgagatagggttgagtgttgttccagtttccaacaagagtccactattaaagaacgtggactccaacgtcaaagggcgaaaaagggtctatcagggcgatggcccactacgtgaaccatcaccctaatcaagttttttggggtcgaggtgccgtaaagcagtaaatcggaagggtaaacggatgcccccatttagagcttgacggggaaagccggcgaacgtggcgagaaaggaagggaagaaagcgaaaggagcgggggctagggcggtgggaagtgtaggggtcacgctgggcgtaaccaccacacccgccgcgcttaatggggcgctacagggcgcgtggggatgatccactagtacggattagaagccgccgagcgggtgacagccctccgaaggaagactctcctccgtgcgtcctcgtcttcaccggtcgcgttcctgaaacgcagatgtgcctcgcgccgcactgctccgaacaataaagattctacaatactagcttttatggttatgaagaggaaaaattggcagtaacctggccccacaaaccttcaaatgaacgaatcaaattaacaaccataggatgataatgcgattagttttttagccttatttctggggtaattaatcagcgaagcgatgatttttgatctattaacagatatataaatgcaaaaactgcataaccactttaactaatactttcaacattttcggtttgtattacttcttattcaaatgtaataaaagtatcaacaaaaaattgttaatatacctctatactttaacgtcaaggagaaaaaaccccggatcggactactagcagctgtaatacgactcactatagggaatattaagcttaaacaatgaggcaggtttggttctcttggattgtgggattgttcctatgttttttcaacgtgtcttctgctgctccagtcaacactacaacagaagatgaaacggcacaaattccggctgaagctgtcatcggttactcagatttagaaggggatttcgatgttgctgttttgccattttccaacagcacaaataacgggttattgtttataaatactactattgccagcattgctgctaaagaagaaggggtatctctcgagaaaagagaggctgaagctatgccaagagaaaacttcttgaagtgcttctcccaatatatcccaaacaacgctactaacttaaagttagtttacactcaaaacaatccattatacatgtctgtcttaaactctactattcataacttaagatttacttccgatactacccctaagccattggttatcgtcaccccatctcacgtctcccatatccaaggtactatcttatgttctaagaaggttggtttgcaaatccgtactagatctggtggtcacgactctgaaggtatgtcctatatctctcaagtcccatttgtcattgttgacttaagaaatatgagatccattaaaattgatgttcattctcaaactgcttgggtcgaagctggtgccaccttgggtgaagtttactactgggtcaacgaaaaaaacgaaaacttatctttagctgccggttactgtccaaccgtctgtgctggtggtcatttcggtggtggtggttacggtccattgatgcgtaactacggtttagctgctgacaacattattgacgctcatttagttaatgttcacggtaaggttttggacagaaaatctatgggtgaagatttattttgggccttgagaggtggtggtgctgaatccttcggtatcatcgttgcctggaagattcgtttagttgctgtcccttctaagtccaccatgttctccgtcaagaaaatcatggaaattcatgagttggtcaaattggttaacaagtggcaaaacatcgcttacaagtatgacaaggatttgttgttaatgactcacttcatcacccgtaatatcaccgacaaccaaggtaagaacaaaactgctattcacacctacttctcctccgtttttttgggtggtgtcgactccttagtcgatttgatgaacaaatcctttccagaattgggtattaagaaaactgattgtagacaattgtcttggattgacaccattatcttctattctggtgtcgttaactacgacaccgacaactttaacaaggaaattttgttggatcgttctgctggtcaaaatggtgccttcaaaatcaaattggactacgtcaaaaagccaatcccagaatctgttttcgttcaaattttggaaaagttgtacgaagaagacattggtgccggtatgtatgctttgtatccatatggtggtatcatggacgaaatttccgaatctgccatcccattcccacacagagctggtattttatatgaattgtggtacatctgttcttgggaaaagcaagaagacaacgaaaagcatttaaactggattagaaacatttacaacttcatgaccccatacgtttctaagaacccaagaggcgcctatttgaactaccgtgacttagatattggtattaatgacccaaagaacccaaacaactatactcaagccagaatttggggtgaaaagtacttcggtaagaacttcgatagattagttaaggttaaaactttggtcgatccaaacaacttcttcagaaacgaacaatccatcccaccattgccaagacatcgtcacggccatcatcaccatcaccattagctcgagcatgcatctagagggccgcatcatgtaattagttatgtcacgcttacattcacgccctccccccacatccgctctaaccgaaaaggaaggagttagacaacctgaagtctaggtccctatttatttttttatagttatgttagtattaagaacgttatttatatttcaaatttttcttttttttctgtacagacgcgtgtacgcatgtaacattatactgaaaaccttgcttgagaaggttttgggacgctcgaaggctttaatttgcggccctgcattaatgaatcggccaacgcgcggggagaggcggtttgcgtattgggcgctcttccgcttcctcgctcactgactcgctgcgctcggtcgttcggctgcggcgagcggtatcagctcactcaaaggcggtaatacggttatccacagaatcaggggataacgcaggaaagaacatgtgagcaaaaggccagcaaaagcccaggaaccgtaaaaaggccgcgttgctggcgtttttccataggctccgcccccctgacgagcatcacaaaaatcgacgctcaagtcagaggtggcgaaacccgacaggactataaagataccaggcgtttccccctggaagctccctcgtgcgctctcctgttccgaccctgccgcttaccggatacctgtccgcctttctcccttcgggaagcgtggcgctttctcatagctcacgctgtaggtatctcagttcggtgtaggtcgttcgctccaagctgggctgtgtgcacgaaccccccgttcagcccgaccgctgcgccttatccggtaactatcgtcttgagtccaacccggtaagacacgacttatcgccactggcagcagccactggtaacaggattagcagagcgaggtatgtaggcggtgctacagagttcttgaagtggtggcctaactacggctacactagaagaacagtatttggtatctgcgctctgctgaagccagttaccttcggaaaaagagttggtagctcttgatccggcaaacaaaccaccgctggtagcggtggtttttttgtttgcaagcagcagattacgcgcagaaaaaaaggatctcaagaagatcctttgatcttttctacggggtctgacgctcagtggaacgaaaactcacgttaagggattttggtcatgagattatcaaaaaggatcttcacctagatccttttaaattaaaaatgaagttttaaatcaatctaaagtatatatgagtaaacttggtctgacagttaccaatgcttaatcagtgaggcacctatctcagcgatctgtctatttcgttcatccatagttgcctgactccccgtcgtgtagataactacgatacgggagcgcttaccatctggccccagtgctgcaatgataccgcgagacccacgctcaccggctccagatttatcagcaataaaccagccagccggaagggccgagcgcagaagtggtcctgcaactttatccgcctccattcagtctattaattgttgccgggaagctagagtaagtagttcgccagttaatagtttgcgcaacgttgttggcattgctacaggcatcgtggtgtcactctcgtcgtttggtatggcttcattcagctccggttcccaacgatcaaggcgagttacatgatcccccatgttgtgcaaaaaagcggttagctccttcggtcctccgatcgttgtcagaagtaagttggccgcagtgttatcactcatggttatggcagcactgcataattctcttactgtcatgccatccgtaagatgcttttctgtgactggtgagtactcaaccaagtcattctgagaatagtgtatgcggcgaccgagttgctcttgcccggcgtcaatacgggataatagtgtatcacatagcagaactttaaaagtgctcatcattggaaaacgttcttcggggcgaaaactctcaaggatcttaccgctgttgagatccagttcgatgtaacccactcgtgcacccaactgatcttcagcatcttttactttcaccagcgtttctgggtgagcaaaaacaggaaggcaaaatgccgcaaaaaagggaataagggcgacacggaaatgttgaatactcatactcttcctttttcaatgggtaataactgatataattaaattgaagctctaatttgtgagtttagtatacatgcatttacttataatacagttttttagttttgctggccgcatcttctcaaatatgcttcccagcctgcttttctgtaacgttcaccctctaccttagcatcccttccctttgcaaatagtcctcttccaacaataataatgtcagatcctgtagagaccacatcatccacggttctatactgttgacccaatgcgtctcccttgtcatctaaacccacaccgggtgtcataatcaaccaatcgtaaccttcatctcttccacccatgtctctttgagcaataaagccgataacaaaatctttgtcgctcttcgcaatgtcaacagtacccttagtatattctccagtagatagggagcccttgcatgacaattctgctaacatcaaaaggcctctaggttcctttgttacttcttctgccgcctgcttcaaaccgctaacaatacctgggcccaccacaccgtgtgcattcgtaatgtctgcccattctgctattctgtatacacccgcagagtactgcaatttgactgtattaccaatgtcagcaaattttctgtcttcg

SEQ ID NO: 71 - DNA, 7266 bp, Artificial Sequence
  OXC154-N331G/G351I/I372L/A383V
aagagtaaaaaattgtacttggcggataatgcctttagcggcttaactgtgccctccatggaaaaatcagtcaagatatccacatgtgtttttagtaaacaaattttgggacctaatgcttcaactaactccagtaattccttggtggtacgaacatccaatgaagcacacaagtttgtttgcttttcgtgcatgatattaaatagcttggcagcaacaggactaggatgagtagcagcacgttccttatatgtagctttcgacatgatttatcttcgtttcctgcaggtttttgttctgtgcagttgggttaagaatactgggcaatttcatgtttcttcaacactacatatgcgtatatataccaatctaagtctgtgctccttccttcgttcttccttctgttcggagattaccgaatcaaaaaaatttcaaagaaaccgaaatcaaaaaaaagaataaaaaaaaaatgatgaattgaattgaaaagctagcttatcgatgataagctgtcaaagatgagaattaattccacggactatagactatactagatactccgtctactgtacgatacacttccgctcaggtccttgtcctttaacgaggccttaccactcttttgttactctattgatccagctcagcaaaggcagtgtgatctaagattctatcttcgcgatgtagtaaaactagctagaccgagaaagagactagaaatgcaaaaggcacttctacaatggctgccatcattattatccgatgtgacgctgcagcttctcaatgatattcgaatacgctttgaggagatacagcctaatatccgacaaactgttttacagatttacgatcgtacttgttacccatcattgaattttgaacatccgaacctgggagttttccctgaaacagatagtatatttgaacctgtataataatatatagtctagcgctttacggaagacaatgtatgtatttcggttcctggagaaactattgcatctattgcataggtaatcttgcacgtcgcatccccggttcattttctgcgtttccatcttgcacttcaatagcatatctttgttcgcttgcctgtaacttacacgcgcctcgtatcttttaatgatggaataatttgggaatttactctgtgtttatttatttttatgttttgtatttggattttagaaagtaaataaagaaggtagaagagttacggaatgaagaaaaaaaaataaacaaaggtttaaaaaatttcaacaaaaagcgtactttacatatatatttattagacaagaaaagcagattaaatagatatacattcgattaacgataagtaaaatgtaaaatcacaggattttcgtgtgtggtcttctacacagacaagatgaaacaattcggcattaatacctgagagcaggaagagcaagataaaaggtagtatttgttggcgatccccctagagtcttttacatcttcggaaaacaaaaactattttttctttaatttctttttttactttctatttttaatttatatatttatattaaaaaatttaaattataattatttttatagcacgtgatgaaaaggaccgggaagctccaccccggttgataatcagaaaagccccaaaaacaggaagattgtataagcaaatatttaaattgtaaacgttaatattttgttaaaattcgcgttaaatttttgttaaatcagctcattttttaacgaatagcccgaaatcggcaaaatcccttataaatcaaaagaatagaccgagatagggttgagtgttgttccagtttccaacaagagtccactattaaagaacgtggactccaacgtcaaagggcgaaaaagggtctatcagggcgatggcccactacgtgaaccatcaccctaatcaagttttttggggtcgaggtgccgtaaagcagtaaatcggaagggtaaacggatgcccccatttagagcttgacggggaaagccggcgaacgtggcgagaaaggaagggaagaaagcgaaaggagcgggggctagggcggtgggaagtgtaggggtcacgctgggcgtaaccaccacacccgccgcgcttaatggggcgctacagggcgcgtggggatgatccactagtacggattagaagccgccgagcgggtgacagccctccgaaggaagactctcctccgtgcgtcctcgtcttcaccggtcgcgttcctgaaacgcagatgtgcctcgcgccgcactgctccgaacaataaagattctacaatactagcttttatggttatgaagaggaaaaattggcagtaacctggccccacaaaccttcaaatgaacgaatcaaattaacaaccataggatgataatgcgattagttttttagccttatttctggggtaattaatcagcgaagcgatgatttttgatctattaacagatatataaatgcaaaaactgcataaccactttaactaatactttcaacattttcggtttgtattacttcttattcaaatgtaataaaagtatcaacaaaaaattgttaatatacctctatactttaacgtcaaggagaaaaaaccccggatcggactactagcagctgtaatacgactcactatagggaatattaagcttaaacaatgaggcaggtttggttctcttggattgtgggattgttcctatgttttttcaacgtgtcttctgctgctccagtcaacactacaacagaagatgaaacggcacaaattccggctgaagctgtcatcggttactcagatttagaaggggatttcgatgttgctgttttgccattttccaacagcacaaataacgggttattgtttataaatactactattgccagcattgctgctaaagaagaaggggtatctctcgagaaaagagaggctgaagctatgccaagagaaaacttcttgaagtgcttctcccaatatatcccaaacaacgctactaacttaaagttagtttacactcaaaacaatccattatacatgtctgtcttaaactctactattcataacttaagatttacttccgatactacccctaagccattggttatcgtcaccccatctcacgtctcccatatccaaggtactatcttatgttctaagaaggttggtttgcaaatccgtactagatctggtggtcacgactctgaaggtatgtcctatatctctcaagtcccatttgtcattgttgacttaagaaatatgagatccattaaaattgatgttcattctcaaactgcttgggtcgaagctggtgccaccttgggtgaagtttactactgggtcaacgaaaaaaacgaaaacttatctttagctgccggttactgtccaaccgtctgtgctggtggtcatttcggtggtggtggttacggtccattgatgcgtaactacggtttagctgctgacaacattattgacgctcatttagttaatgttcacggtaaggttttggacagaaaatctatgggtgaagatttattttgggccttgagaggtggtggtgctgaatccttcggtatcatcgttgcctggaagattcgtttagttgctgtcccttctaagtccaccatgttctccgtcaagaaaatcatggaaattcatgagttggtcaaattggttaacaagtggcaaaacatcgcttacaagtatgacaaggatttgttgttaatgactcacttcatcacccgtaatatcaccgacaaccaaggtaagaacaaaactgctattcacacctacttctcctccgtttttttgggtggtgtcgactccttagtcgatttgatgaacaaatcctttccagaattgggtattaagaaaactgattgtagacaattgtcttggattgacaccattatcttctattctggtgtcgttgggtacgacaccgacaactttaacaaggaaattttgttggatcgttctgctggtcaaaatatcgccttcaaaatcaaattggactacgtcaaaaagccaatcccagaatctgttttcgttcaactgttggaaaagttgtacgaagaagacattggtgtgggtatgtatgctttgtatccatatggtggtatcatggacgaaatttccgaatctgccatcccattcccacacagagctggtattttatatgaattgtggtacatctgttcttgggaaaagcaagaagacaacgaaaagcatttaaactggattagaaacatttacaacttcatgaccccatacgtttctaagaacccaagattagcctatttgaactaccgtgacttagatattggtattaatgacccaaagaacccaaacaactatactcaagccagaatttggggtgaaaagtacttcggtaagaacttcgatagattagttaaggttaaaactttggtcgatccaaacaacttcttcagaaacgaacaatccatcccaccattgccaagacatcgtcacggccatcatcaccatcaccattagctcgagcatgcatctagagggccgcatcatgtaattagttatgtcacgcttacattcacgccctccccccacatccgctctaaccgaaaaggaaggagttagacaacctgaagtctaggtccctatttatttttttatagttatgttagtattaagaacgttatttatatttcaaatttttcttttttttctgtacagacgcgtgtacgcatgtaacattatactgaaaaccttgcttgagaaggttttgggacgctcgaaggctttaatttgcggccctgcattaatgaatcggccaacgcgcggggagaggcggtttgcgtattgggcgctcttccgcttcctcgctcactgactcgctgcgctcggtcgttcggctgcggcgagcggtatcagctcactcaaaggcggtaatacggttatccacagaatcaggggataacgcaggaaagaacatgtgagcaaaaggccagcaaaagcccaggaaccgtaaaaaggccgcgttgctggcgtttttccataggctccgcccccctgacgagcatcacaaaaatcgacgctcaagtcagaggtggcgaaacccgacaggactataaagataccaggcgtttccccctggaagctccctcgtgcgctctcctgttccgaccctgccgcttaccggatacctgtccgcctttctcccttcgggaagcgtggcgctttctcatagctcacgctgtaggtatctcagttcggtgtaggtcgttcgctccaagctgggctgtgtgcacgaaccccccgttcagcccgaccgctgcgccttatccggtaactatcgtcttgagtccaacccggtaagacacgacttatcgccactggcagcagccactggtaacaggattagcagagcgaggtatgtaggcggtgctacagagttcttgaagtggtggcctaactacggctacactagaagaacagtatttggtatctgcgctctgctgaagccagttaccttcggaaaaagagttggtagctcttgatccggcaaacaaaccaccgctggtagcggtggtttttttgtttgcaagcagcagattacgcgcagaaaaaaaggatctcaagaagatcctttgatcttttctacggggtctgacgctcagtggaacgaaaactcacgttaagggattttggtcatgagattatcaaaaaggatcttcacctagatccttttaaattaaaaatgaagttttaaatcaatctaaagtatatatgagtaaacttggtctgacagttaccaatgcttaatcagtgaggcacctatctcagcgatctgtctatttcgttcatccatagttgcctgactccccgtcgtgtagataactacgatacgggagcgcttaccatctggccccagtgctgcaatgataccgcgagacccacgctcaccggctccagatttatcagcaataaaccagccagccggaagggccgagcgcagaagtggtcctgcaactttatccgcctccattcagtctattaattgttgccgggaagctagagtaagtagttcgccagttaatagtttgcgcaacgttgttggcattgctacaggcatcgtggtgtcactctcgtcgtttggtatggcttcattcagctccggttcccaacgatcaaggcgagttacatgatcccccatgttgtgcaaaaaagcggttagctccttcggtcctccgatcgttgtcagaagtaagttggccgcagtgttatcactcatggttatggcagcactgcataattctcttactgtcatgccatccgtaagatgcttttctgtgactggtgagtactcaaccaagtcattctgagaatagtgtatgcggcgaccgagttgctcttgcccggcgtcaatacgggataatagtgtatcacatagcagaactttaaaagtgctcatcattggaaaacgttcttcggggcgaaaactctcaaggatcttaccgctgttgagatccagttcgatgtaacccactcgtgcacccaactgatcttcagcatcttttactttcaccagcgtttctgggtgagcaaaaacaggaaggcaaaatgccgcaaaaaagggaataagggcgacacggaaatgttgaatactcatactcttcctttttcaatgggtaataactgatataattaaattgaagctctaatttgtgagtttagtatacatgcatttacttataatacagttttttagttttgctggccgcatcttctcaaatatgcttcccagcctgcttttctgtaacgttcaccctctaccttagcatcccttccctttgcaaatagtcctcttccaacaataataatgtcagatcctgtagagaccacatcatccacggttctatactgttgacccaatgcgtctcccttgtcatctaaacccacaccgggtgtcataatcaaccaatcgtaaccttcatctcttccacccatgtctctttgagcaataaagccgataacaaaatctttgtcgctcttcgcaatgtcaacagtacccttagtatattctccagtagatagggagcccttgcatgacaattctgctaacatcaaaaggcctctaggttcctttgttacttcttctgccgcctgcttcaaaccgctaacaatacctgggcccaccacaccgtgtgcattcgtaatgtctgcccattctgctattctgtatacacccgcagagtactgcaatttgactgtattaccaatgtcagcaaattttctgtcttcg

SEQ ID NO: 72 - protein, 524 aa, Artificial Sequence
  OXC154-S88A/L451G
MPGENFLKCFSQYIPNNATNLKLVYTQNNPLYMSVLNSTIHNLRFTSDTTPKPLVIVTPSHVSHIQGTILCSKKVGLQIRTRSGGHDAEGMSYISQVPFVIVDLRNMRSIKIDVHSQTAWVEAGATLGEVYYWVNEKNENLSLAAGYCPTVCAGGHFGGGGYGPLMRNYGLAADNIIDAHLVNVHGKVLDRKSMGEDLFWALRGGGAESFGIIVAWKIRLVAVPSKSTMFSVKKIMEIHELVKLVNKWQNIAYKYDKDLLLMTHFITRNITDNQGKNKTAIHTYFSSVFLGGVDSLVDLMNKSFPELGIKKTDCRQLSWIDTIIFYSGVVNYDTDNFNKEILLDRSAGQNGAFKIKLDYVKKPIPESVFVQILEKLYEEDIGAGMYALYPYGGIMDEISESAIPFPHRAGILYELWYICSWEKQEDNEKHLNWIRNIYNFMTPYVSKNPRGAYLNYRDLDIGINDPKNPNNYTQARIWGEKYFGKNFDRLVKVKTLVDPNNFFRNEQSIPPLPRHRHGHHHHHH

SEQ ID NO: 73 - protein, 524 aa, Artificial Sequence
  OXC154-R3G(=GGG)/L21G/S60T/S88A(=GCT)
MPGENFLKCFSQYIPNNATNGKLVYTQNNPLYMSVLNSTIHNLRFTSDTTPKPLVIVTPTHVSHIQGTILCSKKVGLQIRTRSGGHDAEGMSYISQVPFVIVDLRNMRSIKIDVHSQTAWVEAGATLGEVYYWVNEKNENLSLAAGYCPTVCAGGHFGGGGYGPLMRNYGLAADNIIDAHLVNVHGKVLDRKSMGEDLFWALRGGGAESFGIIVAWKIRLVAVPSKSTMFSVKKIMEIHELVKLVNKWQNIAYKYDKDLLLMTHFITRNITDNQGKNKTAIHTYFSSVFLGGVDSLVDLMNKSFPELGIKKTDCRQLSWIDTIIFYSGVVNYDTDNFNKEILLDRSAGQNGAFKIKLDYVKKPIPESVFVQILEKLYEEDIGAGMYALYPYGGIMDEISESAIPFPHRAGILYELWYICSWEKQEDNEKHLNWIRNIYNFMTPYVSKNPRLAYLNYRDLDIGINDPKNPNNYTQARIWGEKYFGKNFDRLVKVKTLVDPNNFFRNEQSIPPLPRHRHGHHHHHH

SEQ ID NO: 74 - protein, 524 aa, Artificial Sequence
  OXC154-R3G(=GGG)/A18E/T49R/S60T/S88A(=GCT)
MPGENFLKCFSQYIPNNETNLKLVYTQNNPLYMSVLNSTIHNLRFTSDRTPKPLVIVTPTHVSHIQGTILCSKKVGLQIRTRSGGHDAEGMSYISQVPFVIVDLRNMRSIKIDVHSQTAWVEAGATLGEVYYWVNEKNENLSLAAGYCPTVCAGGHFGGGGYGPLMRNYGLAADNIIDAHLVNVHGKVLDRKSMGEDLFWALRGGGAESFGIIVAWKIRLVAVPSKSTMFSVKKIMEIHELVKLVNKWQNIAYKYDKDLLLMTHFITRNITDNQGKNKTAIHTYFSSVFLGGVDSLVDLMNKSFPELGIKKTDCRQLSWIDTIIFYSGVVNYDTDNFNKEILLDRSAGQNGAFKIKLDYVKKPIPESVFVQILEKLYEEDIGAGMYALYPYGGIMDEISESAIPFPHRAGILYELWYICSWEKQEDNEKHLNWIRNIYNFMTPYVSKNPRLAYLNYRDLDIGINDPKNPNNYTQARIWGEKYFGKNFDRLVKVKTLVDPNNFFRNEQSIPPLPRHRHGHHHHHH

SEQ ID NO: 75 - protein, 524 aa, Artificial Sequence
  OXC154-R3T/T49R/S88A(=GCC)
MPTENFLKCFSQYIPNNATNLKLVYTQNNPLYMSVLNSTIHNLRFTSDRTPKPLVIVTPSHVSHIQGTILCSKKVGLQIRTRSGGHDAEGMSYISQVPFVIVDLRNMRSIKIDVHSQTAWVEAGATLGEVYYWVNEKNENLSLAAGYCPTVCAGGHFGGGGYGPLMRNYGLAADNIIDAHLVNVHGKVLDRKSMGEDLFWALRGGGAESFGIIVAWKIRLVAVPSKSTMFSVKKIMEIHELVKLVNKWQNIAYKYDKDLLLMTHFITRNITDNQGKNKTAIHTYFSSVFLGGVDSLVDLMNKSFPELGIKKTDCRQLSWIDTIIFYSGVVNYDTDNFNKEILLDRSAGQNGAFKIKLDYVKKPIPESVFVQILEKLYEEDIGAGMYALYPYGGIMDEISESAIPFPHRAGILYELWYICSWEKQEDNEKHLNWIRNIYNFMTPYVSKNPRLAYLNYRDLDIGINDPKNPNNYTQARIWGEKYFGKNFDRLVKVKTLVDPNNFFRNEQSIPPLPRHRHGHHHHHH

SEQ ID NO: 76 - protein, 524 aa, Artificial Sequence
  OXC154-R3W/A18E/T49R/S60T/S88A(=GCT)
MPWENFLKCFSQYIPNNETNLKLVYTQNNPLYMSVLNSTIHNLRFTSDRTPKPLVIVTPTHVSHIQGTILCSKKVGLQIRTRSGGHDAEGMSYISQVPFVIVDLRNMRSIKIDVHSQTAWVEAGATLGEVYYWVNEKNENLSLAAGYCPTVCAGGHFGGGGYGPLMRNYGLAADNIIDAHLVNVHGKVLDRKSMGEDLFWALRGGGAESFGIIVAWKIRLVAVPSKSTMFSVKKIMEIHELVKLVNKWQNIAYKYDKDLLLMTHFITRNITDNQGKNKTAIHTYFSSVFLGGVDSLVDLMNKSFPELGIKKTDCRQLSWIDTIIFYSGVVNYDTDNFNKEILLDRSAGQNGAFKIKLDYVKKPIPESVFVQILEKLYEEDIGAGMYALYPYGGIMDEISESAIPFPHRAGILYELWYICSWEKQEDNEKHLNWIRNIYNFMTPYVSKNPRLAYLNYRDLDIGINDPKNPNNYTQARIWGEKYFGKNFDRLVKVKTLVDPNNFFRNEQSIPPLPRHRHGHHHHHH

SEQ ID NO: 77 - protein, 524 aa, Artificial Sequence
  OXC154-R3V/T49R/S60T/S88A(=GCT)
MPVENFLKCFSQYIPNNATNLKLVYTQNNPLYMSVLNSTIHNLRFTSDRTPKPLVIVTPTHVSHIQGTILCSKKVGLQIRTRSGGHDAEGMSYISQVPFVIVDLRNMRSIKIDVHSQTAWVEAGATLGEVYYWVNEKNENLSLAAGYCPTVCAGGHFGGGGYGPLMRNYGLAADNIIDAHLVNVHGKVLDRKSMGEDLFWALRGGGAESFGIIVAWKIRLVAVPSKSTMFSVKKIMEIHELVKLVNKWQNIAYKYDKDLLLMTHFITRNITDNQGKNKTAIHTYFSSVFLGGVDSLVDLMNKSFPELGIKKTDCRQLSWIDTIIFYSGVVNYDTDNFNKEILLDRSAGQNGAFKIKLDYVKKPIPESVFVQILEKLYEEDIGAGMYALYPYGGIMDEISESAIPFPHRAGILYELWYICSWEKQEDNEKHLNWIRNIYNFMTPYVSKNPRLAYLNYRDLDIGINDPKNPNNYTQARIWGEKYFGKNFDRLVKVKTLVDPNNFFRNEQSIPPLPRHRHGHHHHHH

SEQ ID NO: 78 - protein, 524 aa, Artificial Sequence; identical to SEQ ID NO: 77
  OXC154-R3V/T49R/S60T/S88A(=GCC)

SEQ ID NO: 79 - protein, 524 aa, Artificial Sequence
  OXC154-A18A(=GCC)
MPRENFLKCFSQYIPNNATNLKLVYTQNNPLYMSVLNSTIHNLRFTSDTTPKPLVIVTPSHVSHIQGTILCSKKVGLQIRTRSGGHDSEGMSYISQVPFVIVDLRNMRSIKIDVHSQTAWVEAGATLGEVYYWVNEKNENLSLAAGYCPTVCAGGHFGGGGYGPLMRNYGLAADNIIDAHLVNVHGKVLDRKSMGEDLFWALRGGGAESFGIIVAWKIRLVAVPSKSTMFSVKKIMEIHELVKLVNKWQNIAYKYDKDLLLMTHFITRNITDNQGKNKTAIHTYFSSVFLGGVDSLVDLMNKSFPELGIKKTDCRQLSWIDTIIFYSGVVNYDTDNFNKEILLDRSAGQNGAFKIKLDYVKKPIPESVFVQILEKLYEEDIGAGMYALYPYGGIMDEISESAIPFPHRAGILYELWYICSWEKQEDNEKHLNWIRNIYNFMTPYVSKNPRLAYLNYRDLDIGINDPKNPNNYTQARIWGEKYFGKNFDRLVKVKTLVDPNNFFRNEQSIPPLPRHRHGHHHHHH

SEQ ID NO: 80 - protein, 524 aa, Artificial Sequence
  OXC154-R3T/A18E/T49R/S88A(=GCC)
MPTENFLKCFSQYIPNNETNLKLVYTQNNPLYMSVLNSTIHNLRFTSDRTPKPLVIVTPSHVSHIQGTILCSKKVGLQIRTRSGGHDAEGMSYISQVPFVIVDLRNMRSIKIDVHSQTAWVEAGATLGEVYYWVNEKNENLSLAAGYCPTVCAGGHFGGGGYGPLMRNYGLAADNIIDAHLVNVHGKVLDRKSMGEDLFWALRGGGAESFGIIVAWKIRLVAVPSKSTMFSVKKIMEIHELVKLVNKWQNIAYKYDKDLLLMTHFITRNITDNQGKNKTAIHTYFSSVFLGGVDSLVDLMNKSFPELGIKKTDCRQLSWIDTIIFYSGVVNYDTDNFNKEILLDRSAGQNGAFKIKLDYVKKPIPESVFVQILEKLYEEDIGAGMYALYPYGGIMDEISESAIPFPHRAGILYELWYICSWEKQEDNEKHLNWIRNIYNFMTPYVSKNPRLAYLNYRDLDIGINDPKNPNNYTQARIWGEKYFGKNFDRLVKVKTLVDPNNFFRNEQSIPPLPRHRHGHHHHHH

SEQ ID NO: 81 - protein, 524 aa, Artificial Sequence
  OXC154-R3T/S88A(=GCC)
MPTENFLKCFSQYIPNNATNLKLVYTQNNPLYMSVLNSTIHNLRFTSDTTPKPLVIVTPSHVSHIQGTILCSKKVGLQIRTRSGGHDAEGMSYISQVPFVIVDLRNMRSIKIDVHSQTAWVEAGATLGEVYYWVNEKNENLSLAAGYCPTVCAGGHFGGGGYGPLMRNYGLAADNIIDAHLVNVHGKVLDRKSMGEDLFWALRGGGAESFGIIVAWKIRLVAVPSKSTMFSVKKIMEIHELVKLVNKWQNIAYKYDKDLLLMTHFITRNITDNQGKNKTAIHTYFSSVFLGGVDSLVDLMNKSFPELGIKKTDCRQLSWIDTIIFYSGVVNYDTDNFNKEILLDRSAGQNGAFKIKLDYVKKPIPESVFVQILEKLYEEDIGAGMYALYPYGGIMDEISESAIPFPHRAGILYELWYICSWEKQEDNEKHLNWIRNIYNFMTPYVSKNPRLAYLNYRDLDIGINDPKNPNNYTQARIWGEKYFGKNFDRLVKVKTLVDPNNFFRNEQSIPPLPRHRHGHHHHHH

SEQ ID NO: 82 - protein, 524 aa, Artificial Sequence
  OXC154-R3G(=GGG)/L21G/T49R
MPGENFLKCFSQYIPNNATNGKLVYTQNNPLYMSVLNSTIHNLRFTSDRTPKPLVIVTPSHVSHIQGTILCSKKVGLQIRTRSGGHDSEGMSYISQVPFVIVDLRNMRSIKIDVHSQTAWVEAGATLGEVYYWVNEKNENLSLAAGYCPTVCAGGHFGGGGYGPLMRNYGLAADNIIDAHLVNVHGKVLDRKSMGEDLFWALRGGGAESFGIIVAWKIRLVAVPSKSTMFSVKKIMEIHELVKLVNKWQNIAYKYDKDLLLMTHFITRNITDNQGKNKTAIHTYFSSVFLGGVDSLVDLMNKSFPELGIKKTDCRQLSWIDTIIFYSGVVNYDTDNFNKEILLDRSAGQNGAFKIKLDYVKKPIPESVFVQILEKLYEEDIGAGMYALYPYGGIMDEISESAIPFPHRAGILYELWYICSWEKQEDNEKHLNWIRNIYNFMTPYVSKNPRLAYLNYRDLDIGINDPKNPNNYTQARIWGEKYFGKNFDRLVKVKTLVDPNNFFRNEQSIPPLPRHRHGHHHHHH

SEQ ID NO: 83 - protein, 524 aa, Artificial Sequence; identical to SEQ ID NO: 75
  OXC154-R3T/T49R/S88A(=GCT)

SEQ ID NO: 84 - protein, 524 aa, Artificial Sequence; identical to SEQ ID NO: 74
  OXC154-R3G(=GGA)/A18E/T49R/S60T/S88A(=GCC)

SEQ ID NO: 85 - protein, 524 aa, Artificial Sequence
  OXC154-R3W/T49R/S88A(=GCC)/V97E
MPWENFLKCFSQYIPNNATNLKLVYTQNNPLYMSVLNSTIHNLRFTSDRTPKPLVIVTPSHVSHIQGTILCSKKVGLQIRTRSGGHDAEGMSYISQEPFVIVDLRNMRSIKIDVHSQTAWVEAGATLGEVYYWVNEKNENLSLAAGYCPTVCAGGHFGGGGYGPLMRNYGLAADNIIDAHLVNVHGKVLDRKSMGEDLFWALRGGGAESFGIIVAWKIRLVAVPSKSTMFSVKKIMEIHELVKLVNKWQNIAYKYDKDLLLMTHFITRNITDNQGKNKTAIHTYFSSVFLGGVDSLVDLMNKSFPELGIKKTDCRQLSWIDTIIFYSGVVNYDTDNFNKEILLDRSAGQNGAFKIKLDYVKKPIPESVFVQILEKLYEEDIGAGMYALYPYGGIMDEISESAIPFPHRAGILYELWYICSWEKQEDNEKHLNWIRNIYNFMTPYVSKNPRLAYLNYRDLDIGINDPKNPNNYTQARIWGEKYFGKNFDRLVKVKTLVDPNNFFRNEQSIPPLPRHRHGHHHHHH

SEQ ID NO: 86 - protein, 524 aa, Artificial Sequence
  OXC154-R3G(=GGG)/A18E/S88A(=GCC)
MPGENFLKCFSQYIPNNETNLKLVYTQNNPLYMSVLNSTIHNLRFTSDTTPKPLVIVTPSHVSHIQGTILCSKKVGLQIRTRSGGHDAEGMSYISQVPFVIVDLRNMRSIKIDVHSQTAWVEAGATLGEVYYWVNEKNENLSLAAGYCPTVCAGGHFGGGGYGPLMRNYGLAADNIIDAHLVNVHGKVLDRKSMGEDLFWALRGGGAESFGIIVAWKIRLVAVPSKSTMFSVKKIMEIHELVKLVNKWQNIAYKYDKDLLLMTHFITRNITDNQGKNKTAIHTYFSSVFLGGVDSLVDLMNKSFPELGIKKTDCRQLSWIDTIIFYSGVVNYDTDNFNKEILLDRSAGQNGAFKIKLDYVKKPIPESVFVQILEKLYEEDIGAGMYALYPYGGIMDEISESAIPFPHRAGILYELWYICSWEKQEDNEKHLNWIRNIYNFMTPYVSKNPRLAYLNYRDLDIGINDPKNPNNYTQARIWGEKYFGKNFDRLVKVKTLVDPNNFFRNEQSIPPLPRHRHGHHHHHH

SEQ ID NO: 87 - protein, 524 aa, Artificial Sequence
  OXC154-R3V/A18E/T49R/S60T/S88A(=GCC)
MPVENFLKCFSQYIPNNETNLKLVYTQNNPLYMSVLNSTIHNLRFTSDRTPKPLVIVTPTHVSHIQGTILCSKKVGLQIRTRSGGHDAEGMSYISQVPFVIVDLRNMRSIKIDVHSQTAWVEAGATLGEVYYWVNEKNENLSLAAGYCPTVCAGGHFGGGGYGPLMRNYGLAADNIIDAHLVNVHGKVLDRKSMGEDLFWALRGGGAESFGIIVAWKIRLVAVPSKSTMFSVKKIMEIHELVKLVNKWQNIAYKYDKDLLLMTHFITRNITDNQGKNKTAIHTYFSSVFLGGVDSLVDLMNKSFPELGIKKTDCRQLSWIDTIIFYSGVVNYDTDNFNKEILLDRSAGQNGAFKIKLDYVKKPIPESVFVQILEKLYEEDIGAGMYALYPYGGIMDEISESAIPFPHRAGILYELWYICSWEKQEDNEKHLNWIRNIYNFMTPYVSKNPRLAYLNYRDLDIGINDPKNPNNYTQARIWGEKYFGKNFDRLVKVKTLVDPNNFFRNEQSIPPLPRHRHGHHHHHH

SEQ ID NO: 88 - protein, 524 aa, Artificial Sequence
  OXC154-S60T/S88A(=GCC)
MPRENFLKCFSQYIPNNATNLKLVYTQNNPLYMSVLNSTIHNLRFTSDTTPKPLVIVTPTHVSHIQGTILCSKKVGLQIRTRSGGHDAEGMSYISQVPFVIVDLRNMRSIKIDVHSQTAWVEAGATLGEVYYWVNEKNENLSLAAGYCPTVCAGGHFGGGGYGPLMRNYGLAADNIIDAHLVNVHGKVLDRKSMGEDLFWALRGGGAESFGIIVAWKIRLVAVPSKSTMFSVKKIMEIHELVKLVNKWQNIAYKYDKDLLLMTHFITRNITDNQGKNKTAIHTYFSSVFLGGVDSLVDLMNKSFPELGIKKTDCRQLSWIDTIIFYSGVVNYDTDNFNKEILLDRSAGQNGAFKIKLDYVKKPIPESVFVQILEKLYEEDIGAGMYALYPYGGIMDEISESAIPFPHRAGILYELWYICSWEKQEDNEKHLNWIRNIYNFMTPYVSKNPRLAYLNYRDLDIGINDPKNPNNYTQARIWGEKYFGKNFDRLVKVKTLVDPNNFFRNEQSIPPLPRHRHGHHHHHH

SEQ ID NO: 89 - protein, 524 aa, Artificial Sequence
  OXC154-R3T/A18E/T49R/S60T/S88A(=GCT)
MPTENFLKCFSQYIPNNETNLKLVYTQNNPLYMSVLNSTIHNLRFTSDRTPKPLVIVTPTHVSHIQGTILCSKKVGLQIRTRSGGHDAEGMSYISQVPFVIVDLRNMRSIKIDVHSQTAWVEAGATLGEVYYWVNEKNENLSLAAGYCPTVCAGGHFGGGGYGPLMRNYGLAADNIIDAHLVNVHGKVLDRKSMGEDLFWALRGGGAESFGIIVAWKIRLVAVPSKSTMFSVKKIMEIHELVKLVNKWQNIAYKYDKDLLLMTHFITRNITDNQGKNKTAIHTYFSSVFLGGVDSLVDLMNKSFPELGIKKTDCRQLSWIDTIIFYSGVVNYDTDNFNKEILLDRSAGQNGAFKIKLDYVKKPIPESVFVQILEKLYEEDIGAGMYALYPYGGIMDEISESAIPFPHRAGILYELWYICSWEKQEDNEKHLNWIRNIYNFMTPYVSKNPRLAYLNYRDLDIGINDPKNPNNYTQARIWGEKYFGKNFDRLVKVKTLVDPNNFFRNEQSIPPLPRHRHGHHHHHH

SEQ ID NO: 90 - protein, 524 aa, Artificial Sequence
  OXC154-R3W/L21G/T49R/S88A(=GCC)/V97E
MPWENFLKCFSQYIPNNATNGKLVYTQNNPLYMSVLNSTIHNLRFTSDRTPKPLVIVTPSHVSHIQGTILCSKKVGLQIRTRSGGHDAEGMSYISQEPFVIVDLRNMRSIKIDVHSQTAWVEAGATLGEVYYWVNEKNENLSLAAGYCPTVCAGGHFGGGGYGPLMRNYGLAADNIIDAHLVNVHGKVLDRKSMGEDLFWALRGGGAESFGIIVAWKIRLVAVPSKSTMFSVKKIMEIHELVKLVNKWQNIAYKYDKDLLLMTHFITRNITDNQGKNKTAIHTYFSSVFLGGVDSLVDLMNKSFPELGIKKTDCRQLSWIDTIIFYSGVVNYDTDNFNKEILLDRSAGQNGAFKIKLDYVKKPIPESVFVQILEKLYEEDIGAGMYALYPYGGIMDEISESAIPFPHRAGILYELWYICSWEKQEDNEKHLNWIRNIYNFMTPYVSKNPRLAYLNYRDLDIGINDPKNPNNYTQARIWGEKYFGKNFDRLVKVKTLVDPNNFFRNEQSIPPLPRHRHGHHHHHH

SEQ ID NO: 91 - protein, 524 aa, Artificial Sequence
  OXC154-R3T/A18E/T49R/S60T
MPTENFLKCFSQYIPNNETNLKLVYTQNNPLYMSVLNSTIHNLRFTSDRTPKPLVIVTPTHVSHIQGTILCSKKVGLQIRTRSGGHDSEGMSYISQVPFVIVDLRNMRSIKIDVHSQTAWVEAGATLGEVYYWVNEKNENLSLAAGYCPTVCAGGHFGGGGYGPLMRNYGLAADNIIDAHLVNVHGKVLDRKSMGEDLFWALRGGGAESFGIIVAWKIRLVAVPSKSTMFSVKKIMEIHELVKLVNKWQNIAYKYDKDLLLMTHFITRNITDNQGKNKTAIHTYFSSVFLGGVDSLVDLMNKSFPELGIKKTDCRQLSWIDTIIFYSGVVNYDTDNFNKEILLDRSAGQNGAFKIKLDYVKKPIPESVFVQILEKLYEEDIGAGMYALYPYGGIMDEISESAIPFPHRAGILYELWYICSWEKQEDNEKHLNWIRNIYNFMTPYVSKNPRLAYLNYRDLDIGINDPKNPNNYTQARIWGEKYFGKNFDRLVKVKTLVDPNNFFRNEQSIPPLPRHRHGHHHHHH

SEQ ID NO: 92 - protein, 524 aa, Artificial Sequence
  OXC154-P2W/T26A/S60T
MWRENFLKCFSQYIPNNATNLKLVYAQNNPLYMSVLNSTIHNLRFTSDTTPKPLVIVTPTHVSHIQGTILCSKKVGLQIRTRSGGHDSEGMSYISQVPFVIVDLRNMRSIKIDVHSQTAWVEAGATLGEVYYWVNEKNENLSLAAGYCPTVCAGGHFGGGGYGPLMRNYGLAADNIIDAHLVNVHGKVLDRKSMGEDLFWALRGGGAESFGIIVAWKIRLVAVPSKSTMFSVKKIMEIHELVKLVNKWQNIAYKYDKDLLLMTHFITRNITDNQGKNKTAIHTYFSSVFLGGVDSLVDLMNKSFPELGIKKTDCRQLSWIDTIIFYSGVVNYDTDNFNKEILLDRSAGQNGAFKIKLDYVKKPIPESVFVQILEKLYEEDIGAGMYALYPYGGIMDEISESAIPFPHRAGILYELWYICSWEKQEDNEKHLNWIRNIYNFMTPYVSKNPRLAYLNYRDLDIGINDPKNPNNYTQARIWGEKYFGKNFDRLVKVKTLVDPNNFFRNEQSIPPLPRHRHGHHHHHH

SEQ ID NO: 93 - protein, 524 aa, Artificial Sequence
  OXC154-R3G(=GGG)/L21G/S60T/S88A(=GCC)/V97E
MPGENFLKCFSQYIPNNATNGKLVYTQNNPLYMSVLNSTIHNLRFTSDTTPKPLVIVTPTHVSHIQGTILCSKKVGLQIRTRSGGHDAEGMSYISQEPFVIVDLRNMRSIKIDVHSQTAWVEAGATLGEVYYWVNEKNENLSLAAGYCPTVCAGGHFGGGGYGPLMRNYGLAADNIIDAHLVNVHGKVLDRKSMGEDLFWALRGGGAESFGIIVAWKIRLVAVPSKSTMFSVKKIMEIHELVKLVNKWQNIAYKYDKDLLLMTHFITRNITDNQGKNKTAIHTYFSSVFLGGVDSLVDLMNKSFPELGIKKTDCRQLSWIDTIIFYSGVVNYDTDNFNKEILLDRSAGQNGAFKIKLDYVKKPIPESVFVQILEKLYEEDIGAGMYALYPYGGIMDEISESAIPFPHRAGILYELWYICSWEKQEDNEKHLNWIRNIYNFMTPYVSKNPRLAYLNYRDLDIGINDPKNPNNYTQARIWGEKYFGKNFDRLVKVKTLVDPNNFFRNEQSIPPLPRHRHGHHHHHH

SEQ ID NO: 94 - protein, 524 aa, Artificial Sequence
  OXC154-R3G(=GGG)/A18E/T49R/S88A(=GCC)
MPGENFLKCFSQYIPNNETNLKLVYTQNNPLYMSVLNSTIHNLRFTSDRTPKPLVIVTPSHVSHIQGTILCSKKVGLQIRTRSGGHDAEGMSYISQVPFVIVDLRNMRSIKIDVHSQTAWVEAGATLGEVYYWVNEKNENLSLAAGYCPTVCAGGHFGGGGYGPLMRNYGLAADNIIDAHLVNVHGKVLDRKSMGEDLFWALRGGGAESFGIIVAWKIRLVAVPSKSTMFSVKKIMEIHELVKLVNKWQNIAYKYDKDLLLMTHFITRNITDNQGKNKTAIHTYFSSVFLGGVDSLVDLMNKSFPELGIKKTDCRQLSWIDTIIFYSGVVNYDTDNFNKEILLDRSAGQNGAFKIKLDYVKKPIPESVFVQILEKLYEEDIGAGMYALYPYGGIMDEISESAIPFPHRAGILYELWYICSWEKQEDNEKHLNWIRNIYNFMTPYVSKNPRLAYLNYRDLDIGINDPKNPNNYTQARIWGEKYFGKNFDRLVKVKTLVDPNNFFRNEQSIPPLPRHRHGHHHHHH

SEQ ID NO: 95 - protein, 524 aa, Artificial Sequence
  OXC154-R3T/L21G/S60T/S88A(=GCC)/V97D
MPTENFLKCFSQYIPNNATNGKLVYTQNNPLYMSVLNSTIHNLRFTSDTTPKPLVIVTPTHVSHIQGTILCSKKVGLQIRTRSGGHDAEGMSYISQDPFVIVDLRNMRSIKIDVHSQTAWVEAGATLGEVYYWVNEKNENLSLAAGYCPTVCAGGHFGGGGYGPLMRNYGLAADNIIDAHLVNVHGKVLDRKSMGEDLFWALRGGGAESFGIIVAWKIRLVAVPSKSTMFSVKKIMEIHELVKLVNKWQNIAYKYDKDLLLMTHFITRNITDNQGKNKTAIHTYFSSVFLGGVDSLVDLMNKSFPELGIKKTDCRQLSWIDTIIFYSGVVNYDTDNFNKEILLDRSAGQNGAFKIKLDYVKKPIPESVFVQILEKLYEEDIGAGMYALYPYGGIMDEISESAIPFPHRAGILYELWYICSWEKQEDNEKHLNWIRNIYNFMTPYVSKNPRLAYLNYRDLDIGINDPKNPNNYTQARIWGEKYFGKNFDRLVKVKTLVDPNNFFRNEQSIPPLPRHRHGHHHHHH

SEQ ID NO: 96 - protein, 524 aa, Artificial Sequence
  OXC154-P2W/L21G/T49R/S88A(=GCC)/V97E
MWRENFLKCFSQYIPNNATNGKLVYTQNNPLYMSVLNSTIHNLRFTSDRTPKPLVIVTPSHVSHIQGTILCSKKVGLQIRTRSGGHDAEGMSYISQEPFVIVDLRNMRSIKIDVHSQTAWVEAGATLGEVYYWVNEKNENLSLAAGYCPTVCAGGHFGGGGYGPLMRNYGLAADNIIDAHLVNVHGKVLDRKSMGEDLFWALRGGGAESFGIIVAWKIRLVAVPSKSTMFSVKKIMEIHELVKLVNKWQNIAYKYDKDLLLMTHFITRNITDNQGKNKTAIHTYFSSVFLGGVDSLVDLMNKSFPELGIKKTDCRQLSWIDTIIFYSGVVNYDTDNFNKEILLDRSAGQNGAFKIKLDYVKKPIPESVFVQILEKLYEEDIGAGMYALYPYGGIMDEISESAIPFPHRAGILYELWYICSWEKQEDNEKHLNWIRNIYNFMTPYVSKNPRLAYLNYRDLDIGINDPKNPNNYTQARIWGEKYFGKNFDRLVKVKTLVDPNNFFRNEQSIPPLPRHRHGHHHHHH

SEQ ID NO: 97 - protein, 524 aa, Artificial Sequence
  OXC154-R3G(=GGG)/L21G/T49R/S88A(=GCT)
MPGENFLKCFSQYIPNNATNGKLVYTQNNPLYMSVLNSTIHNLRFTSDRTPKPLVIVTPSHVSHIQGTILCSKKVGLQIRTRSGGHDAEGMSYISQVPFVIVDLRNMRSIKIDVHSQTAWVEAGATLGEVYYWVNEKNENLSLAAGYCPTVCAGGHFGGGGYGPLMRNYGLAADNIIDAHLVNVHGKVLDRKSMGEDLFWALRGGGAESFGIIVAWKIRLVAVPSKSTMFSVKKIMEIHELVKLVNKWQNIAYKYDKDLLLMTHFITRNITDNQGKNKTAIHTYFSSVFLGGVDSLVDLMNKSFPELGIKKTDCRQLSWIDTIIFYSGVVNYDTDNFNKEILLDRSAGQNGAFKIKLDYVKKPIPESVFVQILEKLYEEDIGAGMYALYPYGGIMDEISESAIPFPHRAGILYELWYICSWEKQEDNEKHLNWIRNIYNFMTPYVSKNPRLAYLNYRDLDIGINDPKNPNNYTQARIWGEKYFGKNFDRLVKVKTLVDPNNFFRNEQSIPPLPRHRHGHHHHHH

SEQ ID NO: 98 - protein, 524 aa, Artificial Sequence; identical to SEQ ID NO: 79
  OXC154-S295S(=TCA)

SEQ ID NO: 99 - protein, 524 aa, Artificial Sequence
  OXC154-R3V/L21G/S60T/S88A(=GCC)
MPVENFLKCFSQYIPNNATNGKLVYTQNNPLYMSVLNSTIHNLRFTSDTTPKPLVIVTPTHVSHIQGTILCSKKVGLQIRTRSGGHDAEGMSYISQVPFVIVDLRNMRSIKIDVHSQTAWVEAGATLGEVYYWVNEKNENLSLAAGYCPTVCAGGHFGGGGYGPLMRNYGLAADNIIDAHLVNVHGKVLDRKSMGEDLFWALRGGGAESFGIIVAWKIRLVAVPSKSTMFSVKKIMEIHELVKLVNKWQNIAYKYDKDLLLMTHFITRNITDNQGKNKTAIHTYFSSVFLGGVDSLVDLMNKSFPELGIKKTDCRQLSWIDTIIFYSGVVNYDTDNFNKEILLDRSAGQNGAFKIKLDYVKKPIPESVFVQILEKLYEEDIGAGMYALYPYGGIMDEISESAIPFPHRAGILYELWYICSWEKQEDNEKHLNWIRNIYNFMTPYVSKNPRLAYLNYRDLDIGINDPKNPNNYTQARIWGEKYFGKNFDRLVKVKTLVDPNNFFRNEQSIPPLPRHRHGHHHHHH

SEQ ID NO: 100 - protein, 524 aa, Artificial Sequence
  OXC154-R3T/A18E/S88A(=GCC)
MPTENFLKCFSQYIPNNETNLKLVYTQNNPLYMSVLNSTIHNLRFTSDTTPKPLVIVTPSHVSHIQGTILCSKKVGLQIRTRSGGHDAEGMSYISQVPFVIVDLRNMRSIKIDVHSQTAWVEAGATLGEVYYWVNEKNENLSLAAGYCPTVCAGGHFGGGGYGPLMRNYGLAADNIIDAHLVNVHGKVLDRKSMGEDLFWALRGGGAESFGIIVAWKIRLVAVPSKSTMFSVKKIMEIHELVKLVNKWQNIAYKYDKDLLLMTHFITRNITDNQGKNKTAIHTYFSSVFLGGVDSLVDLMNKSFPELGIKKTDCRQLSWIDTIIFYSGVVNYDTDNFNKEILLDRSAGQNGAFKIKLDYVKKPIPESVFVQILEKLYEEDIGAGMYALYPYGGIMDEISESAIPFPHRAGILYELWYICSWEKQEDNEKHLNWIRNIYNFMTPYVSKNPRLAYLNYRDLDIGINDPKNPNNYTQARIWGEKYFGKNFDRLVKVKTLVDPNNFFRNEQSIPPLPRHRHGHHHHHH

SEQ ID NO: 101 - protein, 524 aa, Artificial Sequence; identical to SEQ ID NO: 88
  OXC154-S60T/S88A(=GCT)

SEQ ID NO: 102 - protein, 524 aa, Artificial Sequence
  OXC154-R3W/T49R/S88A(=GCT)
MPWENFLKCFSQYIPNNATNLKLVYTQNNPLYMSVLNSTIHNLRFTSDRTPKPLVIVTPSHVSHIQGTILCSKKVGLQIRTRSGGHDAEGMSYISQVPFVIVDLRNMRSIKIDVHSQTAWVEAGATLGEVYYWVNEKNENLSLAAGYCPTVCAGGHFGGGGYGPLMRNYGLAADNIIDAHLVNVHGKVLDRKSMGEDLFWALRGGGAESFGIIVAWKIRLVAVPSKSTMFSVKKIMEIHELVKLVNKWQNIAYKYDKDLLLMTHFITRNITDNQGKNKTAIHTYFSSVFLGGVDSLVDLMNKSFPELGIKKTDCRQLSWIDTIIFYSGVVNYDTDNFNKEILLDRSAGQNGAFKIKLDYVKKPIPESVFVQILEKLYEEDIGAGMYALYPYGGIMDEISESAIPFPHRAGILYELWYICSWEKQEDNEKHLNWIRNIYNFMTPYVSKNPRLAYLNYRDLDIGINDPKNPNNYTQARIWGEKYFGKNFDRLVKVKTLVDPNNFFRNEQSIPPLPRHRHGHHHHHH

SEQ ID NO: 103 - protein, 524 aa, Artificial Sequence
  OXC154-T49R/S88A(=GCC)
MPRENFLKCFSQYIPNNATNLKLVYTQNNPLYMSVLNSTIHNLRFTSDRTPKPLVIVTPSHVSHIQGTILCSKKVGLQIRTRSGGHDAEGMSYISQVPFVIVDLRNMRSIKIDVHSQTAWVEAGATLGEVYYWVNEKNENLSLAAGYCPTVCAGGHFGGGGYGPLMRNYGLAADNIIDAHLVNVHGKVLDRKSMGEDLFWALRGGGAESFGIIVAWKIRLVAVPSKSTMFSVKKIMEIHELVKLVNKWQNIAYKYDKDLLLMTHFITRNITDNQGKNKTAIHTYFSSVFLGGVDSLVDLMNKSFPELGIKKTDCRQLSWIDTIIFYSGVVNYDTDNFNKEILLDRSAGQNGAFKIKLDYVKKPIPESVFVQILEKLYEEDIGAGMYALYPYGGIMDEISESAIPFPHRAGILYELWYICSWEKQEDNEKHLNWIRNIYNFMTPYVSKNPRLAYLNYRDLDIGINDPKNPNNYTQARIWGEKYFGKNFDRLVKVKTLVDPNNFFRNEQSIPPLPRHRHGHHHHHH

SEQ ID NO: 104 - protein, 524 aa, Artificial Sequence
  OXC154-R3W/S47F
MPWENFLKCFSQYIPNNATNLKLVYTQNNPLYMSVLNSTIHNLRFTFDTTPKPLVIVTPSHVSHIQGTILCSKKVGLQIRTRSGGHDSEGMSYISQVPFVIVDLRNMRSIKIDVHSQTAWVEAGATLGEVYYWVNEKNENLSLAAGYCPTVCAGGHFGGGGYGPLMRNYGLAADNIIDAHLVNVHGKVLDRKSMGEDLFWALRGGGAESFGIIVAWKIRLVAVPSKSTMFSVKKIMEIHELVKLVNKWQNIAYKYDKDLLLMTHFITRNITDNQGKNKTAIHTYFSSVFLGGVDSLVDLMNKSFPELGIKKTDCRQLSWIDTIIFYSGVVNYDTDNFNKEILLDRSAGQNGAFKIKLDYVKKPIPESVFVQILEKLYEEDIGAGMYALYPYGGIMDEISESAIPFPHRAGILYELWYICSWEKQEDNEKHLNWIRNIYNFMTPYVSKNPRLAYLNYRDLDIGINDPKNPNNYTQARIWGEKYFGKNFDRLVKVKTLVDPNNFFRNEQSIPPLPRHRHGHHHHHH

SEQ ID NO: 105 - protein, 524 aa, Artificial Sequence
  OXC154-A347G/I372L/L451G
MPRENFLKCFSQYIPNNATNLKLVYTQNNPLYMSVLNSTIHNLRFTSDTTPKPLVIVTPSHVSHIQGTILCSKKVGLQIRTRSGGHDSEGMSYISQVPFVIVDLRNMRSIKIDVHSQTAWVEAGATLGEVYYWVNEKNENLSLAAGYCPTVCAGGHFGGGGYGPLMRNYGLAADNIIDAHLVNVHGKVLDRKSMGEDLFWALRGGGAESFGIIVAWKIRLVAVPSKSTMFSVKKIMEIHELVKLVNKWQNIAYKYDKDLLLMTHFITRNITDNQGKNKTAIHTYFSSVFLGGVDSLVDLMNKSFPELGIKKTDCRQLSWIDTIIFYSGVVNYDTDNFNKEILLDRSGGQNGAFKIKLDYVKKPIPESVFVQLLEKLYEEDIGAGMYALYPYGGIMDEISESAIPFPHRAGILYELWYICSWEKQEDNEKHLNWIRNIYNFMTPYVSKNPRGAYLNYRDLDIGINDPKNPNNYTQARIWGEKYFGKNFDRLVKVKTLVDPNNFFRNEQSIPPLPRHRHGHHHHHH

SEQ ID NO: 106 - protein, 524 aa, Artificial Sequence
  OXC154-R3G(=GGG)/L21G/S60T
MPGENFLKCFSQYIPNNATNGKLVYTQNNPLYMSVLNSTIHNLRFTSDTTPKPLVIVTPTHVSHIQGTILCSKKVGLQIRTRSGGHDSEGMSYISQVPFVIVDLRNMRSIKIDVHSQTAWVEAGATLGEVYYWVNEKNENLSLAAGYCPTVCAGGHFGGGGYGPLMRNYGLAADNIIDAHLVNVHGKVLDRKSMGEDLFWALRGGGAESFGIIVAWKIRLVAVPSKSTMFSVKKIMEIHELVKLVNKWQNIAYKYDKDLLLMTHFITRNITDNQGKNKTAIHTYFSSVFLGGVDSLVDLMNKSFPELGIKKTDCRQLSWIDTIIFYSGVVNYDTDNFNKEILLDRSAGQNGAFKIKLDYVKKPIPESVFVQILEKLYEEDIGAGMYALYPYGGIMDEISESAIPFPHRAGILYELWYICSWEKQEDNEKHLNWIRNIYNFMTPYVSKNPRLAYLNYRDLDIGINDPKNPNNYTQARIWGEKYFGKNFDRLVKVKTLVDPNNFFRNEQSIPPLPRHRHGHHHHHH

SEQ ID NO: 107 - protein, 524 aa, Artificial Sequence
  OXC154-R3T/L21G/T49R/S88A(=GCT)
MPTENFLKCFSQYIPNNATNGKLVYTQNNPLYMSVLNSTIHNLRFTSDRTPKPLVIVTPSHVSHIQGTILCSKKVGLQIRTRSGGHDAEGMSYISQVPFVIVDLRNMRSIKIDVHSQTAWVEAGATLGEVYYWVNEKNENLSLAAGYCPTVCAGGHFGGGGYGPLMRNYGLAADNIIDAHLVNVHGKVLDRKSMGEDLFWALRGGGAESFGIIVAWKIRLVAVPSKSTMFSVKKIMEIHELVKLVNKWQNIAYKYDKDLLLMTHFITRNITDNQGKNKTAIHTYFSSVFLGGVDSLVDLMNKSFPELGIKKTDCRQLSWIDTIIFYSGVVNYDTDNFNKEILLDRSAGQNGAFKIKLDYVKKPIPESVFVQILEKLYEEDIGAGMYALYPYGGIMDEISESAIPFPHRAGILYELWYICSWEKQEDNEKHLNWIRNIYNFMTPYVSKNPRLAYLNYRDLDIGINDPKNPNNYTQARIWGEKYFGKNFDRLVKVKTLVDPNNFFRNEQSIPPLPRHRHGHHHHHH

SEQ ID NO: 108 - protein, 524 aa, Artificial Sequence
  OXC154-R3T/L21G/S60T
MPTENFLKCFSQYIPNNATNGKLVYTQNNPLYMSVLNSTIHNLRFTSDTTPKPLVIVTPTHVSHIQGTILCSKKVGLQIRTRSGGHDSEGMSYISQVPFVIVDLRNMRSIKIDVHSQTAWVEAGATLGEVYYWVNEKNENLSLAAGYCPTVCAGGHFGGGGYGPLMRNYGLAADNIIDAHLVNVHGKVLDRKSMGEDLFWALRGGGAESFGIIVAWKIRLVAVPSKSTMFSVKKIMEIHELVKLVNKWQNIAYKYDKDLLLMTHFITRNITDNQGKNKTAIHTYFSSVFLGGVDSLVDLMNKSFPELGIKKTDCRQLSWIDTIIFYSGVVNYDTDNFNKEILLDRSAGQNGAFKIKLDYVKKPIPESVFVQILEKLYEEDIGAGMYALYPYGGIMDEISESAIPFPHRAGILYELWYICSWEKQEDNEKHLNWIRNIYNFMTPYVSKNPRLAYLNYRDLDIGINDPKNPNNYTQARIWGEKYFGKNFDRLVKVKTLVDPNNFFRNEQSIPPLPRHRHGHHHHHH

SEQ ID NO: 109 - protein, 524 aa, Artificial Sequence
  OXC154-R3W/L21G/S88A(=GCT)
MPWENFLKCFSQYIPNNATNGKLVYTQNNPLYMSVLNSTIHNLRFTSDTTPKPLVIVTPSHVSHIQGTILCSKKVGLQIRTRSGGHDAEGMSYISQVPFVIVDLRNMRSIKIDVHSQTAWVEAGATLGEVYYWVNEKNENLSLAAGYCPTVCAGGHFGGGGYGPLMRNYGLAADNIIDAHLVNVHGKVLDRKSMGEDLFWALRGGGAESFGIIVAWKIRLVAVPSKSTMFSVKKIMEIHELVKLVNKWQNIAYKYDKDLLLMTHFITRNITDNQGKNKTAIHTYFSSVFLGGVDSLVDLMNKSFPELGIKKTDCRQLSWIDTIIFYSGVVNYDTDNFNKEILLDRSAGQNGAFKIKLDYVKKPIPESVFVQILEKLYEEDIGAGMYALYPYGGIMDEISESAIPFPHRAGILYELWYICSWEKQEDNEKHLNWIRNIYNFMTPYVSKNPRLAYLNYRDLDIGINDPKNPNNYTQARIWGEKYFGKNFDRLVKVKTLVDPNNFFRNEQSIPPLPRHRHGHHHHHH

SEQ ID NO: 110 - protein, 524 aa, Artificial Sequence
  OXC154-L21G/T49R/S60T/S88A(=GCT)
MPRENFLKCFSQYIPNNATNGKLVYTQNNPLYMSVLNSTIHNLRFTSDRTPKPLVIVTPTHVSHIQGTILCSKKVGLQIRTRSGGHDAEGMSYISQVPFVIVDLRNMRSIKIDVHSQTAWVEAGATLGEVYYWVNEKNENLSLAAGYCPTVCAGGHFGGGGYGPLMRNYGLAADNIIDAHLVNVHGKVLDRKSMGEDLFWALRGGGAESFGIIVAWKIRLVAVPSKSTMFSVKKIMEIHELVKLVNKWQNIAYKYDKDLLLMTHFITRNITDNQGKNKTAIHTYFSSVFLGGVDSLVDLMNKSFPELGIKKTDCRQLSWIDTIIFYSGVVNYDTDNFNKEILLDRSAGQNGAFKIKLDYVKKPIPESVFVQILEKLYEEDIGAGMYALYPYGGIMDEISESAIPFPHRAGILYELWYICSWEKQEDNEKHLNWIRNIYNFMTPYVSKNPRLAYLNYRDLDIGINDPKNPNNYTQARIWGEKYFGKNFDRLVKVKTLVDPNNFFRNEQSIPPLPRHRHGHHHHHH

SEQ ID NO: 111 - protein, 524 aa, Artificial Sequence
  OXC154-A347G/A383V
MPRENFLKCFSQYIPNNATNLKLVYTQNNPLYMSVLNSTIHNLRFTSDTTPKPLVIVTPSHVSHIQGTILCSKKVGLQIRTRSGGHDSEGMSYISQVPFVIVDLRNMRSIKIDVHSQTAWVEAGATLGEVYYWVNEKNENLSLAAGYCPTVCAGGHFGGGGYGPLMRNYGLAADNIIDAHLVNVHGKVLDRKSMGEDLFWALRGGGAESFGIIVAWKIRLVAVPSKSTMFSVKKIMEIHELVKLVNKWQNIAYKYDKDLLLMTHFITRNITDNQGKNKTAIHTYFSSVFLGGVDSLVDLMNKSFPELGIKKTDCRQLSWIDTIIFYSGVVNYDTDNFNKEILLDRSGGQNGAFKIKLDYVKKPIPESVFVQILEKLYEEDIGVGMYALYPYGGIMDEISESAIPFPHRAGILYELWYICSWEKQEDNEKHLNWIRNIYNFMTPYVSKNPRLAYLNYRDLDIGINDPKNPNNYTQARIWGEKYFGKNFDRLVKVKTLVDPNNFFRNEQSIPPLPRHRHGHHHHHH

SEQ ID NO: 112 - protein, 524 aa, Artificial Sequence
  OXC154-R3W/L21G/T49R/S60T/S88A(=GCT)
MPWENFLKCFSQYIPNNATNGKLVYTQNNPLYMSVLNSTIHNLRFTSDRTPKPLVIVTPTHVSHIQGTILCSKKVGLQIRTRSGGHDAEGMSYISQVPFVIVDLRNMRSIKIDVHSQTAWVEAGATLGEVYYWVNEKNENLSLAAGYCPTVCAGGHFGGGGYGPLMRNYGLAADNIIDAHLVNVHGKVLDRKSMGEDLFWALRGGGAESFGIIVAWKIRLVAVPSKSTMFSVKKIMEIHELVKLVNKWQNIAYKYDKDLLLMTHFITRNITDNQGKNKTAIHTYFSSVFLGGVDSLVDLMNKSFPELGIKKTDCRQLSWIDTIIFYSGVVNYDTDNFNKEILLDRSAGQNGAFKIKLDYVKKPIPESVFVQILEKLYEEDIGAGMYALYPYGGIMDEISESAIPFPHRAGILYELWYICSWEKQEDNEKHLNWIRNIYNFMTPYVSKNPRLAYLNYRDLDIGINDPKNPNNYTQARIWGEKYFGKNFDRLVKVKTLVDPNNFFRNEQSIPPLPRHRHGHHHHHH

SEQ ID NO: 113 - protein, 524 aa, Artificial Sequence
  OXC154-A18E/S88A(=GCC)
MPRENFLKCFSQYIPNNETNLKLVYTQNNPLYMSVLNSTIHNLRFTSDTTPKPLVIVTPSHVSHIQGTILCSKKVGLQIRTRSGGHDAEGMSYISQVPFVIVDLRNMRSIKIDVHSQTAWVEAGATLGEVYYWVNEKNENLSLAAGYCPTVCAGGHFGGGGYGPLMRNYGLAADNIIDAHLVNVHGKVLDRKSMGEDLFWALRGGGAESFGIIVAWKIRLVAVPSKSTMFSVKKIMEIHELVKLVNKWQNIAYKYDKDLLLMTHFITRNITDNQGKNKTAIHTYFSSVFLGGVDSLVDLMNKSFPELGIKKTDCRQLSWIDTIIFYSGVVNYDTDNFNKEILLDRSAGQNGAFKIKLDYVKKPIPESVFVQILEKLYEEDIGAGMYALYPYGGIMDEISESAIPFPHRAGILYELWYICSWEKQEDNEKHLNWIRNIYNFMTPYVSKNPRLAYLNYRDLDIGINDPKNPNNYTQARIWGEKYFGKNFDRLVKVKTLVDPNNFFRNEQSIPPLPRHRHGHHHHHH

SEQ ID NO: 114 - protein, 524 aa, Artificial Sequence
  OXC154-R3W/L21G/T49R
MPWENFLKCFSQYIPNNATNGKLVYTQNNPLYMSVLNSTIHNLRFTSDRTPKPLVIVTPSHVSHIQGTILCSKKVGLQIRTRSGGHDSEGMSYISQVPFVIVDLRNMRSIKIDVHSQTAWVEAGATLGEVYYWVNEKNENLSLAAGYCPTVCAGGHFGGGGYGPLMRNYGLAADNIIDAHLVNVHGKVLDRKSMGEDLFWALRGGGAESFGIIVAWKIRLVAVPSKSTMFSVKKIMEIHELVKLVNKWQNIAYKYDKDLLLMTHFITRNITDNQGKNKTAIHTYFSSVFLGGVDSLVDLMNKSFPELGIKKTDCRQLSWIDTIIFYSGVVNYDTDNFNKEILLDRSAGQNGAFKIKLDYVKKPIPESVFVQILEKLYEEDIGAGMYALYPYGGIMDEISESAIPFPHRAGILYELWYICSWEKQEDNEKHLNWIRNIYNFMTPYVSKNPRLAYLNYRDLDIGINDPKNPNNYTQARIWGEKYFGKNFDRLVKVKTLVDPNNFFRNEQSIPPLPRHRHGHHHHHH

SEQ ID NO: 115 - protein, 524 aa, Artificial Sequence
  OXC154-A347G/L451G
MPRENFLKCFSQYIPNNATNLKLVYTQNNPLYMSVLNSTIHNLRFTSDTTPKPLVIVTPSHVSHIQGTILCSKKVGLQIRTRSGGHDSEGMSYISQVPFVIVDLRNMRSIKIDVHSQTAWVEAGATLGEVYYWVNEKNENLSLAAGYCPTVCAGGHFGGGGYGPLMRNYGLAADNIIDAHLVNVHGKVLDRKSMGEDLFWALRGGGAESFGIIVAWKIRLVAVPSKSTMFSVKKIMEIHELVKLVNKWQNIAYKYDKDLLLMTHFITRNITDNQGKNKTAIHTYFSSVFLGGVDSLVDLMNKSFPELGIKKTDCRQLSWIDTIIFYSGVVNYDTDNFNKEILLDRSGGQNGAFKIKLDYVKKPIPESVFVQILEKLYEEDIGAGMYALYPYGGIMDEISESAIPFPHRAGILYELWYICSWEKQEDNEKHLNWIRNIYNFMTPYVSKNPRGAYLNYRDLDIGINDPKNPNNYTQARIWGEKYFGKNFDRLVKVKTLVDPNNFFRNEQSIPPLPRHRHGHHHHHH

SEQ ID NO: 116 - protein, 524 aa, Artificial Sequence
  OXC154-A347G/I372L/A383V/L451G
MPRENFLKCFSQYIPNNATNLKLVYTQNNPLYMSVLNSTIHNLRFTSDTTPKPLVIVTPSHVSHIQGTILCSKKVGLQIRTRSGGHDSEGMSYISQVPFVIVDLRNMRSIKIDVHSQTAWVEAGATLGEVYYWVNEKNENLSLAAGYCPTVCAGGHFGGGGYGPLMRNYGLAADNIIDAHLVNVHGKVLDRKSMGEDLFWALRGGGAESFGIIVAWKIRLVAVPSKSTMFSVKKIMEIHELVKLVNKWQNIAYKYDKDLLLMTHFITRNITDNQGKNKTAIHTYFSSVFLGGVDSLVDLMNKSFPELGIKKTDCRQLSWIDTIIFYSGVVNYDTDNFNKEILLDRSGGQNGAFKIKLDYVKKPIPESVFVQLLEKLYEEDIGVGMYALYPYGGIMDEISESAIPFPHRAGILYELWYICSWEKQEDNEKHLNWIRNIYNFMTPYVSKNPRGAYLNYRDLDIGINDPKNPNNYTQARIWGEKYFGKNFDRLVKVKTLVDPNNFFRNEQSIPPLPRHRHGHHHHHH

SEQ ID NO: 117 - protein, 524 aa, Artificial Sequence
  OXC154-I372L/A383V/L451G
MPRENFLKCFSQYIPNNATNLKLVYTQNNPLYMSVLNSTIHNLRFTSDTTPKPLVIVTPSHVSHIQGTILCSKKVGLQIRTRSGGHDSEGMSYISQVPFVIVDLRNMRSIKIDVHSQTAWVEAGATLGEVYYWVNEKNENLSLAAGYCPTVCAGGHFGGGGYGPLMRNYGLAADNIIDAHLVNVHGKVLDRKSMGEDLFWALRGGGAESFGIIVAWKIRLVAVPSKSTMFSVKKIMEIHELVKLVNKWQNIAYKYDKDLLLMTHFITRNITDNQGKNKTAIHTYFSSVFLGGVDSLVDLMNKSFPELGIKKTDCRQLSWIDTIIFYSGVVNYDTDNFNKEILLDRSAGQNGAFKIKLDYVKKPIPESVFVQLLEKLYEEDIGVGMYALYPYGGIMDEISESAIPFPHRAGILYELWYICSWEKQEDNEKHLNWIRNIYNFMTPYVSKNPRGAYLNYRDLDIGINDPKNPNNYTQARIWGEKYFGKNFDRLVKVKTLVDPNNFFRNEQSIPPLPRHRHGHHHHHH

SEQ ID NO: 118 - protein, 524 aa, Artificial Sequence
  OXC154-R3V/T49R/S88A(=GCT)
MPVENFLKCFSQYIPNNATNLKLVYTQNNPLYMSVLNSTIHNLRFTSDRTPKPLVIVTPSHVSHIQGTILCSKKVGLQIRTRSGGHDAEGMSYISQVPFVIVDLRNMRSIKIDVHSQTAWVEAGATLGEVYYWVNEKNENLSLAAGYCPTVCAGGHFGGGGYGPLMRNYGLAADNIIDAHLVNVHGKVLDRKSMGEDLFWALRGGGAESFGIIVAWKIRLVAVPSKSTMFSVKKIMEIHELVKLVNKWQNIAYKYDKDLLLMTHFITRNITDNQGKNKTAIHTYFSSVFLGGVDSLVDLMNKSFPELGIKKTDCRQLSWIDTIIFYSGVVNYDTDNFNKEILLDRSAGQNGAFKIKLDYVKKPIPESVFVQILEKLYEEDIGAGMYALYPYGGIMDEISESAIPFPHRAGILYELWYICSWEKQEDNEKHLNWIRNIYNFMTPYVSKNPRLAYLNYRDLDIGINDPKNPNNYTQARIWGEKYFGKNFDRLVKVKTLVDPNNFFRNEQSIPPLPRHRHGHHHHHH

SEQ ID NO: 119 - protein, 524 aa, Artificial Sequence
  OXC154-R3G(=GGG)/A18E/S60T
MPGENFLKCFSQYIPNNETNLKLVYTQNNPLYMSVLNSTIHNLRFTSDTTPKPLVIVTPTHVSHIQGTILCSKKVGLQIRTRSGGHDSEGMSYISQVPFVIVDLRNMRSIKIDVHSQTAWVEAGATLGEVYYWVNEKNENLSLAAGYCPTVCAGGHFGGGGYGPLMRNYGLAADNIIDAHLVNVHGKVLDRKSMGEDLFWALRGGGAESFGIIVAWKIRLVAVPSKSTMFSVKKIMEIHELVKLVNKWQNIAYKYDKDLLLMTHFITRNITDNQGKNKTAIHTYFSSVFLGGVDSLVDLMNKSFPELGIKKTDCRQLSWIDTIIFYSGVVNYDTDNFNKEILLDRSAGQNGAFKIKLDYVKKPIPESVFVQILEKLYEEDIGAGMYALYPYGGIMDEISESAIPFPHRAGILYELWYICSWEKQEDNEKHLNWIRNIYNFMTPYVSKNPRLAYLNYRDLDIGINDPKNPNNYTQARIWGEKYFGKNFDRLVKVKTLVDPNNFFRNEQSIPPLPRHRHGHHHHHH

SEQ ID NO: 120 - protein, 524 aa, Artificial Sequence
  OXC154-A347G/I372L/A383V
MPRENFLKCFSQYIPNNATNLKLVYTQNNPLYMSVLNSTIHNLRFTSDTTPKPLVIVTPSHVSHIQGTILCSKKVGLQIRTRSGGHDSEGMSYISQVPFVIVDLRNMRSIKIDVHSQTAWVEAGATLGEVYYWVNEKNENLSLAAGYCPTVCAGGHFGGGGYGPLMRNYGLAADNIIDAHLVNVHGKVLDRKSMGEDLFWALRGGGAESFGIIVAWKIRLVAVPSKSTMFSVKKIMEIHELVKLVNKWQNIAYKYDKDLLLMTHFITRNITDNQGKNKTAIHTYFSSVFLGGVDSLVDLMNKSFPELGIKKTDCRQLSWIDTIIFYSGVVNYDTDNFNKEILLDRSGGQNGAFKIKLDYVKKPIPESVFVQLLEKLYEEDIGVGMYALYPYGGIMDEISESAIPFPHRAGILYELWYICSWEKQEDNEKHLNWIRNIYNFMTPYVSKNPRLAYLNYRDLDIGINDPKNPNNYTQARIWGEKYFGKNFDRLVKVKTLVDPNNFFRNEQSIPPLPRHRHGHHHHHH

SEQ ID NO: 121 - protein, 524 aa, Artificial Sequence
  OXC154-R3T
MPTENFLKCFSQYIPNNATNLKLVYTQNNPLYMSVLNSTIHNLRFTSDTTPKPLVIVTPSHVSHIQGTILCSKKVGLQIRTRSGGHDSEGMSYISQVPFVIVDLRNMRSIKIDVHSQTAWVEAGATLGEVYYWVNEKNENLSLAAGYCPTVCAGGHFGGGGYGPLMRNYGLAADNIIDAHLVNVHGKVLDRKSMGEDLFWALRGGGAESFGIIVAWKIRLVAVPSKSTMFSVKKIMEIHELVKLVNKWQNIAYKYDKDLLLMTHFITRNITDNQGKNKTAIHTYFSSVFLGGVDSLVDLMNKSFPELGIKKTDCRQLSWIDTIIFYSGVVNYDTDNFNKEILLDRSAGQNGAFKIKLDYVKKPIPESVFVQILEKLYEEDIGAGMYALYPYGGIMDEISESAIPFPHRAGILYELWYICSWEKQEDNEKHLNWIRNIYNFMTPYVSKNPRLAYLNYRDLDIGINDPKNPNNYTQARIWGEKYFGKNFDRLVKVKTLVDPNNFFRNEQSIPPLPRHRHGHHHHHH

SEQ ID NO: 122 - protein, 524 aa, Artificial Sequence
  OXC154-R3V/A18E/T49R/V97E
MPVENFLKCFSQYIPNNETNLKLVYTQNNPLYMSVLNSTIHNLRFTSDRTPKPLVIVTPSHVSHIQGTILCSKKVGLQIRTRSGGHDSEGMSYISQEPFVIVDLRNMRSIKIDVHSQTAWVEAGATLGEVYYWVNEKNENLSLAAGYCPTVCAGGHFGGGGYGPLMRNYGLAADNIIDAHLVNVHGKVLDRKSMGEDLFWALRGGGAESFGIIVAWKIRLVAVPSKSTMFSVKKIMEIHELVKLVNKWQNIAYKYDKDLLLMTHFITRNITDNQGKNKTAIHTYFSSVFLGGVDSLVDLMNKSFPELGIKKTDCRQLSWIDTIIFYSGVVNYDTDNFNKEILLDRSAGQNGAFKIKLDYVKKPIPESVFVQILEKLYEEDIGAGMYALYPYGGIMDEISESAIPFPHRAGILYELWYICSWEKQEDNEKHLNWIRNIYNFMTPYVSKNPRLAYLNYRDLDIGINDPKNPNNYTQARIWGEKYFGKNFDRLVKVKTLVDPNNFFRNEQSIPPLPRHRHGHHHHHH

SEQ ID NO: 123 - protein, 524 aa, Artificial Sequence
  OXC154-R3T/L21G/T49R/S60T/S88A(=GCT)
MPTENFLKCFSQYIPNNATNGKLVYTQNNPLYMSVLNSTIHNLRFTSDRTPKPLVIVTPTHVSHIQGTILCSKKVGLQIRTRSGGHDAEGMSYISQVPFVIVDLRNMRSIKIDVHSQTAWVEAGATLGEVYYWVNEKNENLSLAAGYCPTVCAGGHFGGGGYGPLMRNYGLAADNIIDAHLVNVHGKVLDRKSMGEDLFWALRGGGAESFGIIVAWKIRLVAVPSKSTMFSVKKIMEIHELVKLVNKWQNIAYKYDKDLLLMTHFITRNITDNQGKNKTAIHTYFSSVFLGGVDSLVDLMNKSFPELGIKKTDCRQLSWIDTIIFYSGVVNYDTDNFNKEILLDRSAGQNGAFKIKLDYVKKPIPESVFVQILEKLYEEDIGAGMYALYPYGGIMDEISESAIPFPHRAGILYELWYICSWEKQEDNEKHLNWIRNIYNFMTPYVSKNPRLAYLNYRDLDIGINDPKNPNNYTQARIWGEKYFGKNFDRLVKVKTLVDPNNFFRNEQSIPPLPRHRHGHHHHHH

SEQ ID NO: 124 - protein, 524 aa, Artificial Sequence
  OXC154-R3T/L21G/T49R/V97E
MPTENFLKCFSQYIPNNATNGKLVYTQNNPLYMSVLNSTIHNLRFTSDRTPKPLVIVTPSHVSHIQGTILCSKKVGLQIRTRSGGHDSEGMSYISQEPFVIVDLRNMRSIKIDVHSQTAWVEAGATLGEVYYWVNEKNENLSLAAGYCPTVCAGGHFGGGGYGPLMRNYGLAADNIIDAHLVNVHGKVLDRKSMGEDLFWALRGGGAESFGIIVAWKIRLVAVPSKSTMFSVKKIMEIHELVKLVNKWQNIAYKYDKDLLLMTHFITRNITDNQGKNKTAIHTYFSSVFLGGVDSLVDLMNKSFPELGIKKTDCRQLSWIDTIIFYSGVVNYDTDNFNKEILLDRSAGQNGAFKIKLDYVKKPIPESVFVQILEKLYEEDIGAGMYALYPYGGIMDEISESAIPFPHRAGILYELWYICSWEKQEDNEKHLNWIRNIYNFMTPYVSKNPRLAYLNYRDLDIGINDPKNPNNYTQARIWGEKYFGKNFDRLVKVKTLVDPNNFFRNEQSIPPLPRHRHGHHHHHH

SEQ ID NO: 125 - protein, 524 aa, Artificial Sequence
  OXC154-R3V/L21G/T49R/S60T
MPVENFLKCFSQYIPNNATNGKLVYTQNNPLYMSVLNSTIHNLRFTSDRTPKPLVIVTPTHVSHIQGTILCSKKVGLQIRTRSGGHDSEGMSYISQVPFVIVDLRNMRSIKIDVHSQTAWVEAGATLGEVYYWVNEKNENLSLAAGYCPTVCAGGHFGGGGYGPLMRNYGLAADNIIDAHLVNVHGKVLDRKSMGEDLFWALRGGGAESFGIIVAWKIRLVAVPSKSTMFSVKKIMEIHELVKLVNKWQNIAYKYDKDLLLMTHFITRNITDNQGKNKTAIHTYFSSVFLGGVDSLVDLMNKSFPELGIKKTDCRQLSWIDTIIFYSGVVNYDTDNFNKEILLDRSAGQNGAFKIKLDYVKKPIPESVFVQILEKLYEEDIGAGMYALYPYGGIMDEISESAIPFPHRAGILYELWYICSWEKQEDNEKHLNWIRNIYNFMTPYVSKNPRLAYLNYRDLDIGINDPKNPNNYTQARIWGEKYFGKNFDRLVKVKTLVDPNNFFRNEQSIPPLPRHRHGHHHHHH

SEQ ID NO: 126 - protein, 524 aa, Artificial Sequence
  OXC154-G351I/I372L
MPRENFLKCFSQYIPNNATNLKLVYTQNNPLYMSVLNSTIHNLRFTSDTTPKPLVIVTPSHVSHIQGTILCSKKVGLQIRTRSGGHDSEGMSYISQVPFVIVDLRNMRSIKIDVHSQTAWVEAGATLGEVYYWVNEKNENLSLAAGYCPTVCAGGHFGGGGYGPLMRNYGLAADNIIDAHLVNVHGKVLDRKSMGEDLFWALRGGGAESFGIIVAWKIRLVAVPSKSTMFSVKKIMEIHELVKLVNKWQNIAYKYDKDLLLMTHFITRNITDNQGKNKTAIHTYFSSVFLGGVDSLVDLMNKSFPELGIKKTDCRQLSWIDTIIFYSGVVNYDTDNFNKEILLDRSAGQNIAFKIKLDYVKKPIPESVFVQLLEKLYEEDIGAGMYALYPYGGIMDEISESAIPFPHRAGILYELWYICSWEKQEDNEKHLNWIRNIYNFMTPYVSKNPRLAYLNYRDLDIGINDPKNPNNYTQARIWGEKYFGKNFDRLVKVKTLVDPNNFFRNEQSIPPLPRHRHGHHHHHH

SEQ ID NO: 127 - protein, 524 aa, Artificial Sequence
  OXC154-G351I/A383V/L451G
MPRENFLKCFSQYIPNNATNLKLVYTQNNPLYMSVLNSTIHNLRFTSDTTPKPLVIVTPSHVSHIQGTILCSKKVGLQIRTRSGGHDSEGMSYISQVPFVIVDLRNMRSIKIDVHSQTAWVEAGATLGEVYYWVNEKNENLSLAAGYCPTVCAGGHFGGGGYGPLMRNYGLAADNIIDAHLVNVHGKVLDRKSMGEDLFWALRGGGAESFGIIVAWKIRLVAVPSKSTMFSVKKIMEIHELVKLVNKWQNIAYKYDKDLLLMTHFITRNITDNQGKNKTAIHTYFSSVFLGGVDSLVDLMNKSFPELGIKKTDCRQLSWIDTIIFYSGVVNYDTDNFNKEILLDRSAGQNIAFKIKLDYVKKPIPESVFVQILEKLYEEDIGVGMYALYPYGGIMDEISESAIPFPHRAGILYELWYICSWEKQEDNEKHLNWIRNIYNFMTPYVSKNPRGAYLNYRDLDIGINDPKNPNNYTQARIWGEKYFGKNFDRLVKVKTLVDPNNFFRNEQSIPPLPRHRHGHHHHHH

SEQ ID NO: 128 - protein, 524 aa, Artificial Sequence
  OXC154-G351R/I372L/L451G
MPRENFLKCFSQYIPNNATNLKLVYTQNNPLYMSVLNSTIHNLRFTSDTTPKPLVIVTPSHVSHIQGTILCSKKVGLQIRTRSGGHDSEGMSYISQVPFVIVDLRNMRSIKIDVHSQTAWVEAGATLGEVYYWVNEKNENLSLAAGYCPTVCAGGHFGGGGYGPLMRNYGLAADNIIDAHLVNVHGKVLDRKSMGEDLFWALRGGGAESFGIIVAWKIRLVAVPSKSTMFSVKKIMEIHELVKLVNKWQNIAYKYDKDLLLMTHFITRNITDNQGKNKTAIHTYFSSVFLGGVDSLVDLMNKSFPELGIKKTDCRQLSWIDTIIFYSGVVNYDTDNFNKEILLDRSAGQNRAFKIKLDYVKKPIPESVFVQLLEKLYEEDIGAGMYALYPYGGIMDEISESAIPFPHRAGILYELWYICSWEKQEDNEKHLNWIRNIYNFMTPYVSKNPRGAYLNYRDLDIGINDPKNPNNYTQARIWGEKYFGKNFDRLVKVKTLVDPNNFFRNEQSIPPLPRHRHGHHHHHH

SEQ ID NO: 129 - protein, 524 aa, Artificial Sequence
  OXC154-G351I/I372L/A383V/L451G
MPRENFLKCFSQYIPNNATNLKLVYTQNNPLYMSVLNSTIHNLRFTSDTTPKPLVIVTPSHVSHIQGTILCSKKVGLQIRTRSGGHDSEGMSYISQVPFVIVDLRNMRSIKIDVHSQTAWVEAGATLGEVYYWVNEKNENLSLAAGYCPTVCAGGHFGGGGYGPLMRNYGLAADNIIDAHLVNVHGKVLDRKSMGEDLFWALRGGGAESFGIIVAWKIRLVAVPSKSTMFSVKKIMEIHELVKLVNKWQNIAYKYDKDLLLMTHFITRNITDNQGKNKTAIHTYFSSVFLGGVDSLVDLMNKSFPELGIKKTDCRQLSWIDTIIFYSGVVNYDTDNFNKEILLDRSAGQNIAFKIKLDYVKKPIPESVFVQLLEKLYEEDIGVGMYALYPYGGIMDEISESAIPFPHRAGILYELWYICSWEKQEDNEKHLNWIRNIYNFMTPYVSKNPRGAYLNYRDLDIGINDPKNPNNYTQARIWGEKYFGKNFDRLVKVKTLVDPNNFFRNEQSIPPLPRHRHGHHHHHH

SEQ ID NO: 130 - protein, 524 aa, Artificial Sequence
  OXC154-G351R/I372L/A383V/L451G
MPRENFLKCFSQYIPNNATNLKLVYTQNNPLYMSVLNSTIHNLRFTSDTTPKPLVIVTPSHVSHIQGTILCSKKVGLQIRTRSGGHDSEGMSYISQVPFVIVDLRNMRSIKIDVHSQTAWVEAGATLGEVYYWVNEKNENLSLAAGYCPTVCAGGHFGGGGYGPLMRNYGLAADNIIDAHLVNVHGKVLDRKSMGEDLFWALRGGGAESFGIIVAWKIRLVAVPSKSTMFSVKKIMEIHELVKLVNKWQNIAYKYDKDLLLMTHFITRNITDNQGKNKTAIHTYFSSVFLGGVDSLVDLMNKSFPELGIKKTDCRQLSWIDTIIFYSGVVNYDTDNFNKEILLDRSAGQNRAFKIKLDYVKKPIPESVFVQLLEKLYEEDIGVGMYALYPYGGIMDEISESAIPFPHRAGILYELWYICSWEKQEDNEKHLNWIRNIYNFMTPYVSKNPRGAYLNYRDLDIGINDPKNPNNYTQARIWGEKYFGKNFDRLVKVKTLVDPNNFFRNEQSIPPLPRHRHGHHHHHH

SEQ ID NO: 131 - protein, 524 aa, Artificial Sequence
  OXC154-G351I/I372L/A383V
MPRENFLKCFSQYIPNNATNLKLVYTQNNPLYMSVLNSTIHNLRFTSDTTPKPLVIVTPSHVSHIQGTILCSKKVGLQIRTRSGGHDSEGMSYISQVPFVIVDLRNMRSIKIDVHSQTAWVEAGATLGEVYYWVNEKNENLSLAAGYCPTVCAGGHFGGGGYGPLMRNYGLAADNIIDAHLVNVHGKVLDRKSMGEDLFWALRGGGAESFGIIVAWKIRLVAVPSKSTMFSVKKIMEIHELVKLVNKWQNIAYKYDKDLLLMTHFITRNITDNQGKNKTAIHTYFSSVFLGGVDSLVDLMNKSFPELGIKKTDCRQLSWIDTIIFYSGVVNYDTDNFNKEILLDRSAGQNIAFKIKLDYVKKPIPESVFVQLLEKLYEEDIGVGMYALYPYGGIMDEISESAIPFPHRAGILYELWYICSWEKQEDNEKHLNWIRNIYNFMTPYVSKNPRLAYLNYRDLDIGINDPKNPNNYTQARIWGEKYFGKNFDRLVKVKTLVDPNNFFRNEQSIPPLPRHRHGHHHHHH

SEQ ID NO: 132 - protein, 524 aa, Artificial Sequence
  OXC154-N331G/Q349G/I372L/L451G
MPRENFLKCFSQYIPNNATNLKLVYTQNNPLYMSVLNSTIHNLRFTSDTTPKPLVIVTPSHVSHIQGTILCSKKVGLQIRTRSGGHDSEGMSYISQVPFVIVDLRNMRSIKIDVHSQTAWVEAGATLGEVYYWVNEKNENLSLAAGYCPTVCAGGHFGGGGYGPLMRNYGLAADNIIDAHLVNVHGKVLDRKSMGEDLFWALRGGGAESFGIIVAWKIRLVAVPSKSTMFSVKKIMEIHELVKLVNKWQNIAYKYDKDLLLMTHFITRNITDNQGKNKTAIHTYFSSVFLGGVDSLVDLMNKSFPELGIKKTDCRQLSWIDTIIFYSGVVGYDTDNFNKEILLDRSAGGNGAFKIKLDYVKKPIPESVFVQLLEKLYEEDIGAGMYALYPYGGIMDEISESAIPFPHRAGILYELWYICSWEKQEDNEKHLNWIRNIYNFMTPYVSKNPRGAYLNYRDLDIGINDPKNPNNYTQARIWGEKYFGKNFDRLVKVKTLVDPNNFFRNEQSIPPLPRHRHGHHHHHH

SEQ ID NO: 133 - protein, 524 aa, Artificial Sequence
  OXC154-G351R/A383V/L451G
MPRENFLKCFSQYIPNNATNLKLVYTQNNPLYMSVLNSTIHNLRFTSDTTPKPLVIVTPSHVSHIQGTILCSKKVGLQIRTRSGGHDSEGMSYISQVPFVIVDLRNMRSIKIDVHSQTAWVEAGATLGEVYYWVNEKNENLSLAAGYCPTVCAGGHFGGGGYGPLMRNYGLAADNIIDAHLVNVHGKVLDRKSMGEDLFWALRGGGAESFGIIVAWKIRLVAVPSKSTMFSVKKIMEIHELVKLVNKWQNIAYKYDKDLLLMTHFITRNITDNQGKNKTAIHTYFSSVFLGGVDSLVDLMNKSFPELGIKKTDCRQLSWIDTIIFYSGVVNYDTDNFNKEILLDRSAGQNRAFKIKLDYVKKPIPESVFVQILEKLYEEDIGVGMYALYPYGGIMDEISESAIPFPHRAGILYELWYICSWEKQEDNEKHLNWIRNIYNFMTPYVSKNPRGAYLNYRDLDIGINDPKNPNNYTQARIWGEKYFGKNFDRLVKVKTLVDPNNFFRNEQSIPPLPRHRHGHHHHHH

SEQ ID NO: 134 - protein, 524 aa, Artificial Sequence
  OXC154-Q349G/A383V/L451G
MPRENFLKCFSQYIPNNATNLKLVYTQNNPLYMSVLNSTIHNLRFTSDTTPKPLVIVTPSHVSHIQGTILCSKKVGLQIRTRSGGHDSEGMSYISQVPFVIVDLRNMRSIKIDVHSQTAWVEAGATLGEVYYWVNEKNENLSLAAGYCPTVCAGGHFGGGGYGPLMRNYGLAADNIIDAHLVNVHGKVLDRKSMGEDLFWALRGGGAESFGIIVAWKIRLVAVPSKSTMFSVKKIMEIHELVKLVNKWQNIAYKYDKDLLLMTHFITRNITDNQGKNKTAIHTYFSSVFLGGVDSLVDLMNKSFPELGIKKTDCRQLSWIDTIIFYSGVVNYDTDNFNKEILLDRSAGGNGAFKIKLDYVKKPIPESVFVQILEKLYEEDIGVGMYALYPYGGIMDEISESAIPFPHRAGILYELWYICSWEKQEDNEKHLNWIRNIYNFMTPYVSKNPRGAYLNYRDLDIGINDPKNPNNYTQARIWGEKYFGKNFDRLVKVKTLVDPNNFFRNEQSIPPLPRHRHGHHHHHH

SEQ ID NO: 135 - protein, 524 aa, Artificial Sequence
  OXC154-A383V/L451G
MPRENFLKCFSQYIPNNATNLKLVYTQNNPLYMSVLNSTIHNLRFTSDTTPKPLVIVTPSHVSHIQGTILCSKKVGLQIRTRSGGHDSEGMSYISQVPFVIVDLRNMRSIKIDVHSQTAWVEAGATLGEVYYWVNEKNENLSLAAGYCPTVCAGGHFGGGGYGPLMRNYGLAADNIIDAHLVNVHGKVLDRKSMGEDLFWALRGGGAESFGIIVAWKIRLVAVPSKSTMFSVKKIMEIHELVKLVNKWQNIAYKYDKDLLLMTHFITRNITDNQGKNKTAIHTYFSSVFLGGVDSLVDLMNKSFPELGIKKTDCRQLSWIDTIIFYSGVVNYDTDNFNKEILLDRSAGQNGAFKIKLDYVKKPIPESVFVQILEKLYEEDIGVGMYALYPYGGIMDEISESAIPFPHRAGILYELWYICSWEKQEDNEKHLNWIRNIYNFMTPYVSKNPRGAYLNYRDLDIGINDPKNPNNYTQARIWGEKYFGKNFDRLVKVKTLVDPNNFFRNEQSIPPLPRHRHGHHHHHH

SEQ ID NO: 136 - protein, 524 aa, Artificial Sequence
  OXC154-N331G/Q349G
MPRENFLKCFSQYIPNNATNLKLVYTQNNPLYMSVLNSTIHNLRFTSDTTPKPLVIVTPSHVSHIQGTILCSKKVGLQIRTRSGGHDSEGMSYISQVPFVIVDLRNMRSIKIDVHSQTAWVEAGATLGEVYYWVNEKNENLSLAAGYCPTVCAGGHFGGGGYGPLMRNYGLAADNIIDAHLVNVHGKVLDRKSMGEDLFWALRGGGAESFGIIVAWKIRLVAVPSKSTMFSVKKIMEIHELVKLVNKWQNIAYKYDKDLLLMTHFITRNITDNQGKNKTAIHTYFSSVFLGGVDSLVDLMNKSFPELGIKKTDCRQLSWIDTIIFYSGVVGYDTDNFNKEILLDRSAGGNGAFKIKLDYVKKPIPESVFVQILEKLYEEDIGAGMYALYPYGGIMDEISESAIPFPHRAGILYELWYICSWEKQEDNEKHLNWIRNIYNFMTPYVSKNPRLAYLNYRDLDIGINDPKNPNNYTQARIWGEKYFGKNFDRLVKVKTLVDPNNFFRNEQSIPPLPRHRHGHHHHHH

SEQ ID NO: 137 - protein, 524 aa, Artificial Sequence
  OXC154-G351I
MPRENFLKCFSQYIPNNATNLKLVYTQNNPLYMSVLNSTIHNLRFTSDTTPKPLVIVTPSHVSHIQGTILCSKKVGLQIRTRSGGHDSEGMSYISQVPFVIVDLRNMRSIKIDVHSQTAWVEAGATLGEVYYWVNEKNENLSLAAGYCPTVCAGGHFGGGGYGPLMRNYGLAADNIIDAHLVNVHGKVLDRKSMGEDLFWALRGGGAESFGIIVAWKIRLVAVPSKSTMFSVKKIMEIHELVKLVNKWQNIAYKYDKDLLLMTHFITRNITDNQGKNKTAIHTYFSSVFLGGVDSLVDLMNKSFPELGIKKTDCRQLSWIDTIIFYSGVVNYDTDNFNKEILLDRSAGQNIAFKIKLDYVKKPIPESVFVQILEKLYEEDIGAGMYALYPYGGIMDEISESAIPFPHRAGILYELWYICSWEKQEDNEKHLNWIRNIYNFMTPYVSKNPRLAYLNYRDLDIGINDPKNPNNYTQARIWGEKYFGKNFDRLVKVKTLVDPNNFFRNEQSIPPLPRHRHGHHHHHH

SEQ ID NO: 138 - protein, 524 aa, Artificial Sequence
  OXC154-L451G
MPRENFLKCFSQYIPNNATNLKLVYTQNNPLYMSVLNSTIHNLRFTSDTTPKPLVIVTPSHVSHIQGTILCSKKVGLQIRTRSGGHDSEGMSYISQVPFVIVDLRNMRSIKIDVHSQTAWVEAGATLGEVYYWVNEKNENLSLAAGYCPTVCAGGHFGGGGYGPLMRNYGLAADNIIDAHLVNVHGKVLDRKSMGEDLFWALRGGGAESFGIIVAWKIRLVAVPSKSTMFSVKKIMEIHELVKLVNKWQNIAYKYDKDLLLMTHFITRNITDNQGKNKTAIHTYFSSVFLGGVDSLVDLMNKSFPELGIKKTDCRQLSWIDTIIFYSGVVNYDTDNFNKEILLDRSAGQNGAFKIKLDYVKKPIPESVFVQILEKLYEEDIGAGMYALYPYGGIMDEISESAIPFPHRAGILYELWYICSWEKQEDNEKHLNWIRNIYNFMTPYVSKNPRGAYLNYRDLDIGINDPKNPNNYTQARIWGEKYFGKNFDRLVKVKTLVDPNNFFRNEQSIPPLPRHRHGHHHHHH

SEQ ID NO: 139 - protein, 524 aa, Artificial Sequence
  OXC154-N331G/G351I/I372L/A383V
MPRENFLKCFSQYIPNNATNLKLVYTQNNPLYMSVLNSTIHNLRFTSDTTPKPLVIVTPSHVSHIQGTILCSKKVGLQIRTRSGGHDSEGMSYISQVPFVIVDLRNMRSIKIDVHSQTAWVEAGATLGEVYYWVNEKNENLSLAAGYCPTVCAGGHFGGGGYGPLMRNYGLAADNIIDAHLVNVHGKVLDRKSMGEDLFWALRGGGAESFGIIVAWKIRLVAVPSKSTMFSVKKIMEIHELVKLVNKWQNIAYKYDKDLLLMTHFITRNITDNQGKNKTAIHTYFSSVFLGGVDSLVDLMNKSFPELGIKKTDCRQLSWIDTIIFYSGVVGYDTDNFNKEILLDRSAGQNIAFKIKLDYVKKPIPESVFVQLLEKLYEEDIGVGMYALYPYGGIMDEISESAIPFPHRAGILYELWYICSWEKQEDNEKHLNWIRNIYNFMTPYVSKNPRLAYLNYRDLDIGINDPKNPNNYTQARIWGEKYFGKNFDRLVKVKTLVDPNNFFRNEQSIPPLPRHRHGHHHHHH

SEQ ID NO: 140 - protein, 523 aa, Artificial Sequence
  OXC52
MPRENFLKCFSQYIPNNATNLKLVYTQNNPLYMSVLNSTIHNLRFTSDTTPKPLVIVTPSHVSHIQGTILCSKKVGLQIRTRSGGHDSEGMSYISQVPFVIVDLRNMRSIKIDVHSQTAWVEAGATLGEVYYWVNEKNENLSLAAGYCPTVCAGGHFGGGGYGPLMRNYGLAADNIIDAHLVNVHGKVLDRKSMGEDLFWALRGGGAESFGIIVAWKIRLVAVPKSTMFSVKKIMEIHELVKLVNKWQNIAYKYDKDLLLMTHFITRNITDNQGKNKTAIHTYFSSVFLGGVDSLVDLMNKSFPELGIKKTDCRQLSWIDTIIFYSGVVNYDTDNFNKEILLDRSAGQNGAFKIKLDYVKKPIPESVFVQILEKLYEEDIGAGMYALYPYGGIMDEISESAIPFPHRAGILYELWYICSWEKQEDNEKHLNWIRNIYNFMTPYVSKNPRLAYLNYRDLDIGINDPKNPNNYTQARIWGEKYFGKNFDRLVKVKTLVDPNNFFRNEQSIPPLPRHRHGHHHHHH

SEQ ID NO: 141 - protein, 524 aa, Artificial Sequence
  OXC154
MPGENFLKCFSQYIPNNATNLKLVYTQNNPLYMSVLNSTIHNLRFTSDTTPKPLVIVTPSHVSHIQGTILCSKKVGLQIRTRSGGHDSEGMSYISQVPFVIVDLRNMRSIKIDVHSQTAWVEAGATLGEVYYWVNEKNENLSLAAGYCPTVCAGGHFGGGGYGPLMRNYGLAADNIIDAHLVNVHGKVLDRKSMGEDLFWALRGGGAESFGIIVAWKIRLVAVPSKSTMFSVKKIMEIHELVKLVNKWQNIAYKYDKDLLLMTHFITRNITDNQGKNKTAIHTYFSSVFLGGVDSLVDLMNKSFPELGIKKTDCRQLSWIDTIIFYSGVVNYDTDNFNKEILLDRSAGQNGAFKIKLDYVKKPIPESVFVQILEKLYEEDIGAGMYALYPYGGIMDEISESAIPFPHRAGILYELWYICSWEKQEDNEKHLNWIRNIYNFMTPYVSKNPRLAYLNYRDLDIGINDPKNPNNYTQARIWGEKYFGKNFDRLVKVKTLVDPNNFFRNEQSIPPLPRHRHGHHHHHH

SEQ ID NO: 142 - DNA, 3564 bp, Artificial Sequence
  NpgA
tcaatcaaagcaacccacaaatcctaggctgaatcatgatatcgatggaagcaatcaacaattttatcaagaccgcaccaaagcacgactatctgacaggcggagttcatcattctggtaatgtagacgtgttacaattaagcggcaataaagaagatggtagtttagtatggaaccatacttttgttgatgtagacaacaatgtggtagctaagtttgaagacgctctcgaaaaacttgaaagtttgcaccggcgctcatcctcatccacaggcaatgaagaacacgctaacgtttaaccgaggggagtcacttcataatgatgtgagaaataagtgaatattgtaataattgttgggactccattgtcaacaaaagctataatgtaggtatacagtatatactagaagttctcctcgaggatcttggaatccacaaaagggagtcgataaatctatataataaaaattactttatcttctttcgttttatacgttgtcgtttattatcctattacgttatcaatcttcgcatttcagctttcattagatttgatgactgtttctcaaactttatgtcattttcttacaccgcataaacaacaaataatcataaaaattttagaactagacataaagcaacaggcgcgttggacttttaattttcgaggaccgcgaatccttacatcacacccaatcccccacaagtgatcccccacacaccatagcttcaaaatgtttctactccttttttactcttccagattttctcggactccgcgcatcgccgtaccacttcaaaacacccaagcacagcatactaaatttcccctctttcttcctctagggtgtcgttaattacccgtactaaaggtttggaaaagaaaaaagagaccgcctcgtttctttttcttcgtcgaaaaaggcaataaaaatttttatcacgtttctttttcttgaaaatttttttttttgatttttttctctttcgatgacctcccattgatatttaagttaataaacggtcttcaatttctcaagtttcagtttcatttttcttgttctattacaactttttttacttcttgctcattagaaagaaagcatagcaatctaatctaagttttaatctagaaaatttattataaaaggaagagaaataattaaacaatggttcaagatacctcttctgcttctacctctccaattttgactagatggtacattgataccagaccattgactgcttctactgctgctttgccattattggaaactttacaaccagccgatcaaatctccgttcaaaagtactatcacttgaaggacaagcacatgtctttggcttctaacttgttgaagtacttgttcgttcacagaaactgcagaattccatggtcctctatcgttatttctagaactccagatccacatagaaggccatgttatattccaccatctggttctcaagaggattcttttaaagatggttacaccggtatcaacgtcgagtttaatgtttctcatcaagcctccatggttgctattgctggtactgcttttactccaaattctggtggtgattctaagttgaaaccagaagttggtatcgatattacctgcgtcaacgaaagacaaggtagaaatggtgaagaaaggtccttggaatctttgagacagtacatcgatatcttctccgaagttttctctactgctgaaatggccaacattagaagattggatggtgtctcttcttcctcattgtctgctgatagattggttgattatggctacaggttgttctatacttactgggctttgaaagaagcctacattaagatgactggtgaagccttgttggctccatggttgagagaattggaattctctaatgttgttgctccagctgctgttgctgaatctggtgattctgctggtgattttggtgaaccatatactggtgttagaaccaccttgtacaagaacttggttgaagatgttagaattgaagttgctgctttgggtggtgattacttgtttgctactgctgctagaggtggtggtattggtgcttcttctagaccaggtggtggtccagatggttctggtattagatctcaagatccttggaggccattcaagaagttggatattgaaagggatattcaaccatgtgctactggtgtatgtaactgcttgtcttaaagacataaaactgaaacaacaccaattaataatagactttacagaagacgggagacactagcacacaactttaccaggcaaggtatttgacgctagcatgtgtccaattcagtgtcatttatgattttttgtagtaggatataaatatatacagcgctccaaatagtgcggttgccccaaaaacaccacggaacctcatctgttctcgtactttgttgtgacaaagtagctcactgccttattatcacattttcattatgcaacgcttcggaaaatacgatgttgaaaatgcctctagagatgaaaaacaatcgtaaaagggtcctgcgtaattgaaacatttgatcagtatgcagtggcacagaaacaaccaggaatactatagtcataggcaatacaaggtatatattggctatgcagacccctccagaaagtaccgacgtcaagttagatacacttaacgaacctagtgcacatttaattgagaaaaatgtggctcttcctaaggacatattccgttcgtacttgagttattggatctatgaaatcgctcgctatacaccagtcatgattttgtccttaaataacatactcatcactaaacattcttaacaatcagaaaatgcaaccgataaaacattataaatcttcgcggttatctggcattgttattaaccaaaaaaatgccggcctattacaagctactgttcaataaatattgttgtaatgaagacggtccaactgtacaaatacagcaaactgtcatatataaggtgtcttatgtgacagcacttgcgttattgtcagccggagtatgtctttgtcgcattctgggctttttactttctgctcagaaggaagtacgaacaagaaaaaaaaatcaccaatgcttcccttttcagtattagtttcatatttgtttacgttcaaactcgtcgtttgcgcgataacctctaaaaaagtcagttacgtaactatatcaatcagagaatgcaaaaagcactatcataaaaatgtctctaggggatgtgagacatgtcaattataagaagtgatggtgtcatagtatatatatcataaatgattatcaaagtttcaatcctttgtattttctagtttagcgccaacttttgacaaaacctaaactttagataatcatcattcttacaatttttatctggatggcaataatctcctatataaagcccagataaactgtaaaaagaatccatcactatttgaaaaaaagtcatctggcacgtttaattatcagagcagaaatgatgaagggtgttagcgccgtccattgatgcgcctggtagtcatgatttacgtataactaacacatcatgaggacggc

SEQ ID NO: 143 - DNA, 11114 bp, Artificial Sequence
  DiPKS-1
tggaccacttcttcttggacttcttaccaccagcaagagcggcagcggctttggcagctttagacaattgttgctttggaggcatgttatattatgttctgagacgtaagaaagggtgaaaattgatgttagtgtcaaaaattatattacaaaatacgcagagatattctagttcctttgatgaatgaatctttcagaaaaaaaagtcaaagcaaaagcaaaatggcctgcagactaaactgtatggtggtcttggaatgataaagatctgtttaatagatttagtagatacaatagcacatctcattacccagttatgattgacgtcattctgagttacaatgatcttaagcaacaggcgcgttggacttttaattttcgaggaccgcgaatccttacatcacacccaatcccccacaagtgatcccccacacaccatagcttcaaaatgtttctactccttttttactcttccagattttctcggactccgcgcatcgccgtaccacttcaaaacacccaagcacagcatactaaatttcccctctttcttcctctagggtgtcgttaattacccgtactaaaggtttggaaaagaaaaaagagaccgcctcgtttctttttcttcgtcgaaaaaggcaataaaaatttttatcacgtttctttttcttgaaaatttttttttttgatttttttctctttcgatgacctcccattgatatttaagttaataaacggtcttcaatttctcaagtttcagtttcatttttcttgttctattacaactttttttacttcttgctcattagaaagaaagcatagcaatctaatctaagttttaataaacaatgaacaagaactccaaaatccagtccccaaactcttctgatgttgctgttattggtgttggttttagattcccaggtaactctaatgacccagaatctttgtggaacaacttgttggatggtttcgatgctattacccaagtcccaaaagaaagatgggctacttcttttagagagatgggtttgatcaagaacaagttcggtggtttcttgaaggattctgaatggaagaatttcgaccctttgttctttggtatcggtccaaaagaagctccattcattgatccacaacaaaggttgttgttgtccatcgtttgggaatctttggaagatgcttacatcagaccagatgaattgagaggttctaacactggtgttttcatcggtgtttctaacaacgattacaccaagttgggtttccaagacaactactctatttctccatacactatgaccggctctaactcttcattgaactccaacagaatttcctactgcttcgattttagaggtccatccattactgttgataccgcttgttcttcttccttggtttctgttaatttgggtgtccaatccatccaaatgggtgaatgtaagattgctatttgcggtggtgttaacgctttgtttgatccatctacatctgttgccttttccaagttgggtgttttgtctgaaaatggcagatgcaactcttttagtgatcaagcctctggttacgttagatctgaaggtgctggtgttgttgttttgaagtctttggaacaagctaagttggatggtgatagaatctacggtgttatcaagggtgtttcctctaatgaagatggtgcttctaatggtgacaagaactctttgactactccatcttgtgaagcccaatccattaacatttctaaggctatggaaaaggcctccttgtctccatctgatatctattacattgaagcccatggtactggtactccagttggtgatccaattgaagttaaggccttgtccaagatcttctccaactctaacaacaaccagttgaacaacttctctaccgatggtaatgataacgatgatgatgatgacgataacacctctccagaaccattattgattggctcattcaagtccaacatcggtcatttggaatctgctgctggtattgcttctttgattaagtgttgcttgatgttgaagaacaggatgttggttccatccattaactgctctaatttgaacccatccattccattcgatcagtacaacatctccgttatcagagaaatcagacaattcccaaccgataagttggttaacatcggtatcaattctttcggtttcggtggttctaactgccatttgattattcaagagtacaacaacaacttcaagaacaactctaccatctgcaataacaacaacaacaacaataacaacatcgactacttgatcccaatctcctctaagactaagaagtccttggataagtacttgattttgatcaagaccaactccaactaccacaaggatatttctttcgatgacttcgtcaagttccaaatcaagtctaagcagtacaacttgtccaacagaatgactaccattgctaacgattggaactccttcattaagggttctaacgaattccacaacttgatcgaatctaaggatggtgaaggtggttcttcatcttctaacagaggtattgattccgccaatcaaatcaacactactactacctctaccatcaacgatatcgaacctttgttggttttcgttttctgtggtcaaggtccacaatggaatggtatgattaagaccttgtacaactccgagaacgttttcaagaacaccgttgatcatgttgacagcatcttgtacaagtacttcggttactccattttgaacgtcttgtctaagatcgatgataacgacgattccatcaaccatccaatagttgctcaaccatctttgttcttgttgcaaattggtttggtcgagttgtttaagtactggggtatctacccatctatctctgttggtcattctttcggtgaagtctcttcttattacttgtccggtatcatctctttggaaaccgcttgtaaaatcgtctacgtcagatcctctaatcagaacaaaactatgggttccggtaagatgttggttgtttctatgggttttaagcaatggaacgatcaattctctgctgaatggtccgatattgaaattgcttgttacaacgctccagattccatagttgttactggtaacgaagaaagattgaaagaattgtccatcaagttgtccgacgaatccaatcaaattttcaacaccttcttgaggtccccatgttcttttcattcttcccatcaagaagtcatcaagggttctatgttcgaagagttgtctaacttgcaatctactggtgaaaccgaaatccctttgttctctactgttactggtagacaagttttgtctggtcatgttactgctcaacacatctacgataatgttagagaaccagtcttgttccaaaagacgattgaatccattacctcctacatcaagtctcactacccatccaatcaaaaggttatctacgttgaaattgctccacacccaaccttgttttcattgatcaaaaagtccatcccatcctccaacaagaattcctcttctgttttgtgtccattgaacagaaaagaaaactccaacaactcctacaagaagttcgtttctcagttgtacttcaacggtgttaacgttgacttcaacttccagttgaactccatttgcgataacgttaacaacgatcaccatttgaacaacgtcaagcaaaactccttcaaagagactaccaattccttgccaagataccaatgggaacaagatgaatattggtccgaaccattgatctccagaaagaatagattggaaggtccaactacttccttgttgggtcatagaattatctacagcttcccagttttccaatccgttttggacttgcaatctgacaactacaaatacttgttggaccacttggttaacggtaagccagtttttccaggtgctggttatttggatatcatcatcgaattcttcgactaccaaaagcagcagttgaattcctctgattcctctaactcctacatcatcaacgttgacaagatccaattcttgaacccaattcacttgaccgaaaacaagttgcaaaccttgcaatcttctttcgaacctatcgttactaagaagtctgccttctctgttaacttcttcatcaaggataccgtcgaggatcaatctaaggttaagtctatgtctgacgaaacttggactaacacttgtaaggctaccatttccttggaacaacaacagccatctccatcttctactttgactttgtctaagaagcaagacttgcagatcttgagaaacagatgcgatattagcaagctagacaagtttgagttgtacgacaagatctctaagaatttgggcttgcagtacaactccttgtttcaagttgttgataccatcgaaactggtaaggattgctcttttgctactttgtctttgccagaagatactttgttcaccaccattttgaacccatgcttgttggataactgtttccatggtttgttgaccttgatcaacgaaaagggttctttcgttgtcgagtccatttcttctgtttctatctacttggagaacatcggttccttcaatcaaacttctgttggtaacgtccagttctacttgtacaccactatttctaaagccacctcctttagttctgaaggtacttgtaagttgttcaccaaggatggttccttgattttgtctatcggtaagttcatcatcaagtccaccaatccaaagtctactaagaccaacgaaactatcgaatctccattggacgaaaccttctctattgaatggcaatctaaggattctccaattccaaccccacaacaaatccaacaacaatctccattgaactctaacccatccttcattagatctaccatcttgaaggacatccagttcgaacaatactgctcctccattatccacaaagaattgatcaaccacgaaaagtacaagaaccagcaatccttcgatatcaactccttggaaaaccacttgaacgatgaccaattgatggaatccttgtccatctccaaagaatacttgagattcttcaccaggatcatctccatcattaagcaatacccaaagatcttgaacgaaaaagagctaaaagaattgaaagaaatcatcgaattgaagtacccatccgaagttcagttgttggaattcgaagttatcgagaaggtgtccatgattatcccaaagttgttgttcgaaaacgacaagcaatcttccatgaccttgttccaagataacttgttgaccaggttctactccaattctaactctaccagattctacttggaaagggtttccgaaatggtcttggaatctattagaccaatcgtcagagaaaagagggtgttcagaattttagagatcggtgctcgtacaggctctttgtctaatgttgttttgactaagttgaacacctacttgtccaccttgaattctaatggtggttctggttacaacatcatcattgagtacaccttcaccgatatttccgccaacttcattattggtgaaatccaagaaaccatgtgcaacttgtacccaaacgttactttcaagttctccgtcttggacttggagaaagagattattaactcctccgatttcttgatgggtgattacgatatagttttgatggcctacgttatccatgccgtttctaacattaagttctccatcgaacagttgtacaagttgttgtctccaagaggttggttgttgtgtattgaacctaagtccaacgttgtgttctccgatttggttttcggttgttttaatcagtggtggaactactacgatgatattagaactacccactgctccttgtctgaatctcaatggaatcagttgttgttgaaccagtccttgaacaacgaatcctcttcttcttctaactgttacggtggtttctccaacgtttcttttattggtggtgaaaaggatgtcgactcccattctttcatattgcactgccaaaaagaatccatctcccaaatgaagttagccaccactattaacaacggtttgtcatctggttccatcgttatcgttttgaactctcaacaattgaccaacatgaagtcctacccaaaggttattgagtatattcaagaggctacctctttgtgcaagaccattgaaattatcgattccaaggacgtcttgaactctaccaattcagttttggaaaagatccaaaagtccttgttggtgttctgtttgttgggttatgacttgttggagaacaactaccaagaacagtctttcgaatacgttaagttgttgaacttgatctctactaccgcctcttcatctaatgataagaaaccaccaaaggtcttgttgatcaccaagcaatctgaaagaatctccaggtctttctactccagatccttgattggtatttccagaacctctatgaacgagtacccaaatttgtccattacctctatcgatttggataccaacgactactcattgcagtctttgttgaagccaatcttcagcaactctaagttttccgacaacgagttcatcttcaaaaagggcttgatgttcgtgtccaggatctttaagaacaagcagttgctagaatcctccaacgcttttgaaactgactcttctaacttgtactgtaaggcctcttctgacttgtcttacaagtacgctattaagcagtctatgttgaccgaaaatcagatcgaaatcaaggttgaatgcgtcggtattaacttcaaggacaacctattctacaagggcttgttgccacaagaaattttcagaatgggtgacatctacaatccaccatatggtttggaatgctctggtgttattaccagaattggttctaacgtcaccgaatactcagttggtcaaaatgtttttggtttcgccagacattctttgggttctcatgttgttaccaacaaggatttggttatcttgaagccagataccatctcattttctgaagctgcttctatcccagttgtttactgtactgcttggtactccttgttcaacattggtcagttgtctaacgaagaatccatcctaattcattctgctactggtggtgtaggtttggcttctttgaatttgttgaaaatgaagaatcagcaacagcaaccattgaccaatgtttatgctactgttggctctaacgagaagaagaagttcttgatcgataacttcaacaacttgttcaaagaggacggcgaaaacattttctctaccagagacaaagaatactccaaccagttggaatccaagatcgatgttattttgaacaccttgtccggtgaattcgtcgaatctaatttcaagtccttgagatccttcggtagattgattgatttgtctgctactcacgtttacgccaatcaacaaattggtctaggtaacttcaagttcgaccacttgtattctgctgttgacttggaaagattgatcgacgaaaaacctaagttgttgcagtccatcttgcaaagaattaccaactctatcgtcaacggttccttggaaaaaattccaattaccatcttcccatccaccgaaactaaggatgctatcgaattattgtccaagagatcccatatcggtaaagttgttgtagattgcaccgatatctctaagtgtaatcctgttggtgatgtgatcaccaacttctctatgagattgccaaagccaaactaccagttgaatttgaactccaccttgttgattactggtcagtctggtttgtctatccctttgttgaattggttgttgtctaagtctggtggtaacgttaagaacgttgtcatcatttctaagtccaccatgaagtggaagttgcagactatgatttcccatttcgtttccggtttcggtatccattttaactacgttcaagtcgacatctccaactacgatgctttgtctgaagctattaagcaattgccatctgatttgccaccaatcacctctgtttttcatttggctgctatctacaacgatgttccaatggatcaagttaccatgtctaccgttgaatctgttcataaccctaaagttttgggtgccgttaacttgcatagaatctctgtttcttttggttggaagttgaaccacttcgtcttgttctcttctattactgctattaccggttacccagaccaatctatctacaattctgccaactctattttggacgctttgtccaactttagaaggtttatgggtttgccatccttctccattaacttgggtccaatgaaggatgaaggtaaggtttctaccaacaagagcatcaagaagctattcaagtctagaggtttgccaagcctatccttgaacaagttatttggtttgttggaggtcgtcatcaacaacccatctaatcatgttatcccatcccaattgatttgctccccaatcgatttcaagacctacatcgaatctttctcaactatgaggccaaagttgttacacttgcaacctaccatttccaagcagcaatcttctatcattaacgattctaccaaggcttcctccaacatttcattgcaagataagatcacctccaaggtgtctgatttgttgtccattccaatctccaagatcaacttcgatcatccattgaaacactacggcttggattctttgttgaccgttcaattcaaatcctggatcgacaaagaattcgaaaagaacttgttcacccatatccaattggccaccatctctattaactcattcttggaaaaggtgaacggcttgtctacaaacaataacaacaacaacaattccaacgtcaagtcctctccatccattgtcaaagaagaaatcgttaccttggacaaggatcaacaaccattgctattgaaagaacaccagcacattatcatctccccagatattagaatcaacaagccaaagagggaatccttgattagaaccccaatcttgaacaaattcaaccagatcaccgaatccattatcactccatctacaccatctttgtcccaatccgatgttttgaaaactccaccaatcaagtctttgaacaacactaagaactccagcttgattaacaccccaccaattcaatctgtccaacaacatcaaaagcaacaacaaaaggtccaagtcatccaacaacagcaacaaccattatccagattgtcctacaagagcaacaacaactctttcgttttgggtatcggtatttctgttccaggtgaacctatttcccaacaatccttgaaagactccatctccaatgacttttctgataaggctgaaactaacgagaaggtcaagagaatctttgagcaatctcaaatcaagaccagacacttggttagagattacactaagccagagaactccatcaagttcagacatttggaaaccattaccgatgtgaacaaccagttcaagaaagttgttccagatttggctcaacaagcctgtttgagagctttgaaagattggggtggtgataagggtgatattacccatatagtttctgttacctccaccggtattatcatcccagatgttaatttcaagttgatcgacttgttgggcttgaacaaggatgttgaaagagtgtctttgaacctaatgggttgtttggctggtttgagttctttgagaactgctgcttctttggctaaggcttctccaagaaatagaattttggttgtctgtaccgaagtctgctccttgcatttttctaatactgatggtggtgatcaaatggtcgcctcttctatttttgctgatggttctgctgcttacattattggttgtaacccaagaattgaagaaaccccattatacgaagtcatgtgctccattaacagatctttcccaaataccgaaaacgccatggtttgggatttggaaaaagaaggttggaacttgggtttggatgcttctattccaattgtcattggttctggtattgaagccttcgttgatactttgttggataaggctaagttgcaaacttccactgctatttctgctaaggattgcgaattcttgattcatactggtggcaagtccatcttgatgaacatcgaaaattccttgggtatcgacccaaagcaaactaagaatacttgggatgtttaccatgcctacggcaatatgtcatctgcctctgttattttcgttatggatcatgccagaaagtccaagtctttgccaacttactcaatttctttggcttttggtccaggtttggcttttgaaggttgtttcttgaagaacgtcgtctgaacagaagacgggagacactagcacacaactttaccaggcaaggtatttgacgctagcatgtgtccaattcagtgtcatttatgattttttgtagtaggatataaatatatacagcgctccaaatagtgcggttgccccaaaaacaccacggaacctcatctgttctcgtactttgttgtgacaaagtagctcactgccttattatcacattttcattatgcaacgcttcggaaaatacgatgttgaaaatgcctctagagatgaaaaacaatcgtaaaagggtcctgcgtaattgaaacatttgatcagtatgcagtggcacagaaacaaccaggaatactatagtcataggcaatacaaggtatatattggctatgcagacccctccagaaagtaccgacgtcaagttagatacacttaacgaacctagtgcacatttaattgagaaaaatgtggctcttcctatggacatattccgttcgtacttgagttattggatctatgaaatcgctcgctatacaccagtcatgattttgtcgaagttattatccaggaggcacggatgcaaaagatagaagacaaattaatttccttaaaattcaaaatgctcattattgtcacgctgtatgagcatttggtgaagatttcactgggaaatgttgcaataatttgataatcgttcgtattggatgaaactgtaacatcatctgtttattaagtatccgtgttattagtatatcatcacatacggtgtaagaagataacataaagattgagaaacagtcatcaaatataatggaagctgaaatgcgaggattgatg

SEQ ID NO: 144 - DNA, 10890 bp, Artificial Sequence
  DiPKS-2
acgatgattcagttcgccttctatcctttgtttacgtatttgtttatatatataactttatttttttttattaattgggctgcaagacaattttgttgtcagtgatgcctcaatccttcttttgcttccatatttaccatgtggaccctttcaaaacagagttgtatctctgcaggatgccctttttgacgtattgaatggcataattgcactgtcaaagcaacaggcgcgttggacttttaattttcgaggaccgcgaatccttacatcacacccaatcccccacaagtgatcccccacacaccatagcttcaaaatgtttctactccttttttactcttccagattttctcggactccgcgcatcgccgtaccacttcaaaacacccaagcacagcatactaaatttcccctctttcttcctctagggtgtcgttaattacccgtactaaaggtttggaaaagaaaaaagagaccgcctcgtttctttttcttcgtcgaaaaaggcaataaaaatttttatcacgtttctttttcttgaaaatttttttttttgatttttttctctttcgatgacctcccattgatatttaagttaataaacggtcttcaatttctcaagtttcagtttcatttttcttgttctattacaactttttttacttcttgctcattagaaagaaagcatagcaatctaatctaagttttaataaacaatgaacaagaactccaaaatccagtccccaaactcttctgatgttgctgttattggtgttggttttagattcccaggtaactctaatgacccagaatctttgtggaacaacttgttggatggtttcgatgctattacccaagtcccaaaagaaagatgggctacttcttttagagagatgggtttgatcaagaacaagttcggtggtttcttgaaggattctgaatggaagaatttcgaccctttgttctttggtatcggtccaaaagaagctccattcattgatccacaacaaaggttgttgttgtccatcgtttgggaatctttggaagatgcttacatcagaccagatgaattgagaggttctaacactggtgttttcatcggtgtttctaacaacgattacaccaagttgggtttccaagacaactactctatttctccatacactatgaccggctctaactcttcattgaactccaacagaatttcctactgcttcgattttagaggtccatccattactgttgataccgcttgttcttcttccttggtttctgttaatttgggtgtccaatccatccaaatgggtgaatgtaagattgctatttgcggtggtgttaacgctttgtttgatccatctacatctgttgccttttccaagttgggtgttttgtctgaaaatggcagatgcaactcttttagtgatcaagcctctggttacgttagatctgaaggtgctggtgttgttgttttgaagtctttggaacaagctaagttggatggtgatagaatctacggtgttatcaagggtgtttcctctaatgaagatggtgcttctaatggtgacaagaactctttgactactccatcttgtgaagcccaatccattaacatttctaaggctatggaaaaggcctccttgtctccatctgatatctattacattgaagcccatggtactggtactccagttggtgatccaattgaagttaaggccttgtccaagatcttctccaactctaacaacaaccagttgaacaacttctctaccgatggtaatgataacgatgatgatgatgacgataacacctctccagaaccattattgattggctcattcaagtccaacatcggtcatttggaatctgctgctggtattgcttctttgattaagtgttgcttgatgttgaagaacaggatgttggttccatccattaactgctctaatttgaacccatccattccattcgatcagtacaacatctccgttatcagagaaatcagacaattcccaaccgataagttggttaacatcggtatcaattctttcggtttcggtggttctaactgccatttgattattcaagagtacaacaacaacttcaagaacaactctaccatctgcaataacaacaacaacaacaataacaacatcgactacttgatcccaatctcctctaagactaagaagtccttggataagtacttgattttgatcaagaccaactccaactaccacaaggatatttctttcgatgacttcgtcaagttccaaatcaagtctaagcagtacaacttgtccaacagaatgactaccattgctaacgattggaactccttcattaagggttctaacgaattccacaacttgatcgaatctaaggatggtgaaggtggttcttcatcttctaacagaggtattgattccgccaatcaaatcaacactactactacctctaccatcaacgatatcgaacctttgttggttttcgttttctgtggtcaaggtccacaatggaatggtatgattaagaccttgtacaactccgagaacgttttcaagaacaccgttgatcatgttgacagcatcttgtacaagtacttcggttactccattttgaacgtcttgtctaagatcgatgataacgacgattccatcaaccatccaatagttgctcaaccatctttgttcttgttgcaaattggtttggtcgagttgtttaagtactggggtatctacccatctatctctgttggtcattctttcggtgaagtctcttcttattacttgtccggtatcatctctttggaaaccgcttgtaaaatcgtctacgtcagatcctctaatcagaacaaaactatgggttccggtaagatgttggttgtttctatgggttttaagcaatggaacgatcaattctctgctgaatggtccgatattgaaattgcttgttacaacgctccagattccatagttgttactggtaacgaagaaagattgaaagaattgtccatcaagttgtccgacgaatccaatcaaattttcaacaccttcttgaggtccccatgttcttttcattcttcccatcaagaagtcatcaagggttctatgttcgaagagttgtctaacttgcaatctactggtgaaaccgaaatccctttgttctctactgttactggtagacaagttttgtctggtcatgttactgctcaacacatctacgataatgttagagaaccagtcttgttccaaaagacgattgaatccattacctcctacatcaagtctcactacccatccaatcaaaaggttatctacgttgaaattgctccacacccaaccttgttttcattgatcaaaaagtccatcccatcctccaacaagaattcctcttctgttttgtgtccattgaacagaaaagaaaactccaacaactcctacaagaagttcgtttctcagttgtacttcaacggtgttaacgttgacttcaacttccagttgaactccatttgcgataacgttaacaacgatcaccatttgaacaacgtcaagcaaaactccttcaaagagactaccaattccttgccaagataccaatgggaacaagatgaatattggtccgaaccattgatctccagaaagaatagattggaaggtccaactacttccttgttgggtcatagaattatctacagcttcccagttttccaatccgttttggacttgcaatctgacaactacaaatacttgttggaccacttggttaacggtaagccagtttttccaggtgctggttatttggatatcatcatcgaattcttcgactaccaaaagcagcagttgaattcctctgattcctctaactcctacatcatcaacgttgacaagatccaattcttgaacccaattcacttgaccgaaaacaagttgcaaaccttgcaatcttctttcgaacctatcgttactaagaagtctgccttctctgttaacttcttcatcaaggataccgtcgaggatcaatctaaggttaagtctatgtctgacgaaacttggactaacacttgtaaggctaccatttccttggaacaacaacagccatctccatcttctactttgactttgtctaagaagcaagacttgcagatcttgagaaacagatgcgatattagcaagctagacaagtttgagttgtacgacaagatctctaagaatttgggcttgcagtacaactccttgtttcaagttgttgataccatcgaaactggtaaggattgctcttttgctactttgtctttgccagaagatactttgttcaccaccattttgaacccatgcttgttggataactgtttccatggtttgttgaccttgatcaacgaaaagggttctttcgttgtcgagtccatttcttctgtttctatctacttggagaacatcggttccttcaatcaaacttctgttggtaacgtccagttctacttgtacaccactatttctaaagccacctcctttagttctgaaggtacttgtaagttgttcaccaaggatggttccttgattttgtctatcggtaagttcatcatcaagtccaccaatccaaagtctactaagaccaacgaaactatcgaatctccattggacgaaaccttctctattgaatggcaatctaaggattctccaattccaaccccacaacaaatccaacaacaatctccattgaactctaacccatccttcattagatctaccatcttgaaggacatccagttcgaacaatactgctcctccattatccacaaagaattgatcaaccacgaaaagtacaagaaccagcaatccttcgatatcaactccttggaaaaccacttgaacgatgaccaattgatggaatccttgtccatctccaaagaatacttgagattcttcaccaggatcatctccatcattaagcaatacccaaagatcttgaacgaaaaagagctaaaagaattgaaagaaatcatcgaattgaagtacccatccgaagttcagttgttggaattcgaagttatcgagaaggtgtccatgattatcccaaagttgttgttcgaaaacgacaagcaatcttccatgaccttgttccaagataacttgttgaccaggttctactccaattctaactctaccagattctacttggaaagggtttccgaaatggtcttggaatctattagaccaatcgtcagagaaaagagggtgttcagaattttagagatcggtgctcgtacaggctctttgtctaatgttgttttgactaagttgaacacctacttgtccaccttgaattctaatggtggttctggttacaacatcatcattgagtacaccttcaccgatatttccgccaacttcattattggtgaaatccaagaaaccatgtgcaacttgtacccaaacgttactttcaagttctccgtcttggacttggagaaagagattattaactcctccgatttcttgatgggtgattacgatatagttttgatggcctacgttatccatgccgtttctaacattaagttctccatcgaacagttgtacaagttgttgtctccaagaggttggttgttgtgtattgaacctaagtccaacgttgtgttctccgatttggttttcggttgttttaatcagtggtggaactactacgatgatattagaactacccactgctccttgtctgaatctcaatggaatcagttgttgttgaaccagtccttgaacaacgaatcctcttcttcttctaactgttacggtggtttctccaacgtttcttttattggtggtgaaaaggatgtcgactcccattctttcatattgcactgccaaaaagaatccatctcccaaatgaagttagccaccactattaacaacggtttgtcatctggttccatcgttatcgttttgaactctcaacaattgaccaacatgaagtcctacccaaaggttattgagtatattcaagaggctacctctttgtgcaagaccattgaaattatcgattccaaggacgtcttgaactctaccaattcagttttggaaaagatccaaaagtccttgttggtgttctgtttgttgggttatgacttgttggagaacaactaccaagaacagtctttcgaatacgttaagttgttgaacttgatctctactaccgcctcttcatctaatgataagaaaccaccaaaggtcttgttgatcaccaagcaatctgaaagaatctccaggtctttctactccagatccttgattggtatttccagaacctctatgaacgagtacccaaatttgtccattacctctatcgatttggataccaacgactactcattgcagtctttgttgaagccaatcttcagcaactctaagttttccgacaacgagttcatcttcaaaaagggcttgatgttcgtgtccaggatctttaagaacaagcagttgctagaatcctccaacgcttttgaaactgactcttctaacttgtactgtaaggcctcttctgacttgtcttacaagtacgctattaagcagtctatgttgaccgaaaatcagatcgaaatcaaggttgaatgcgtcggtattaacttcaaggacaacctattctacaagggcttgttgccacaagaaattttcagaatgggtgacatctacaatccaccatatggtttggaatgctctggtgttattaccagaattggttctaacgtcaccgaatactcagttggtcaaaatgtttttggtttcgccagacattctttgggttctcatgttgttaccaacaaggatttggttatcttgaagccagataccatctcattttctgaagctgcttctatcccagttgtttactgtactgcttggtactccttgttcaacattggtcagttgtctaacgaagaatccatcctaattcattctgctactggtggtgtaggtttggcttctttgaatttgttgaaaatgaagaatcagcaacagcaaccattgaccaatgtttatgctactgttggctctaacgagaagaagaagttcttgatcgataacttcaacaacttgttcaaagaggacggcgaaaacattttctctaccagagacaaagaatactccaaccagttggaatccaagatcgatgttattttgaacaccttgtccggtgaattcgtcgaatctaatttcaagtccttgagatccttcggtagattgattgatttgtctgctactcacgtttacgccaatcaacaaattggtctaggtaacttcaagttcgaccacttgtattctgctgttgacttggaaagattgatcgacgaaaaacctaagttgttgcagtccatcttgcaaagaattaccaactctatcgtcaacggttccttggaaaaaattccaattaccatcttcccatccaccgaaactaaggatgctatcgaattattgtccaagagatcccatatcggtaaagttgttgtagattgcaccgatatctctaagtgtaatcctgttggtgatgtgatcaccaacttctctatgagattgccaaagccaaactaccagttgaatttgaactccaccttgttgattactggtcagtctggtttgtctatccctttgttgaattggttgttgtctaagtctggtggtaacgttaagaacgttgtcatcatttctaagtccaccatgaagtggaagttgcagactatgatttcccatttcgtttccggtttcggtatccattttaactacgttcaagtcgacatctccaactacgatgctttgtctgaagctattaagcaattgccatctgatttgccaccaatcacctctgtttttcatttggctgctatctacaacgatgttccaatggatcaagttaccatgtctaccgttgaatctgttcataaccctaaagttttgggtgccgttaacttgcatagaatctctgtttcttttggttggaagttgaaccacttcgtcttgttctcttctattactgctattaccggttacccagaccaatctatctacaattctgccaactctattttggacgctttgtccaactttagaaggtttatgggtttgccatccttctccattaacttgggtccaatgaaggatgaaggtaaggtttctaccaacaagagcatcaagaagctattcaagtctagaggtttgccaagcctatccttgaacaagttatttggtttgttggaggtcgtcatcaacaacccatctaatcatgttatcccatcccaattgatttgctccccaatcgatttcaagacctacatcgaatctttctcaactatgaggccaaagttgttacacttgcaacctaccatttccaagcagcaatcttctatcattaacgattctaccaaggcttcctccaacatttcattgcaagataagatcacctccaaggtgtctgatttgttgtccattccaatctccaagatcaacttcgatcatccattgaaacactacggcttggattctttgttgaccgttcaattcaaatcctggatcgacaaagaattcgaaaagaacttgttcacccatatccaattggccaccatctctattaactcattcttggaaaaggtgaacggcttgtctacaaacaataacaacaacaacaattccaacgtcaagtcctctccatccattgtcaaagaagaaatcgttaccttggacaaggatcaacaaccattgctattgaaagaacaccagcacattatcatctccccagatattagaatcaacaagccaaagagggaatccttgattagaaccccaatcttgaacaaattcaaccagatcaccgaatccattatcactccatctacaccatctttgtcccaatccgatgttttgaaaactccaccaatcaagtctttgaacaacactaagaactccagcttgattaacaccccaccaattcaatctgtccaacaacatcaaaagcaacaacaaaaggtccaagtcatccaacaacagcaacaaccattatccagattgtcctacaagagcaacaacaactctttcgttttgggtatcggtatttctgttccaggtgaacctatttcccaacaatccttgaaagactccatctccaatgacttttctgataaggctgaaactaacgagaaggtcaagagaatctttgagcaatctcaaatcaagaccagacacttggttagagattacactaagccagagaactccatcaagttcagacatttggaaaccattaccgatgtgaacaaccagttcaagaaagttgttccagatttggctcaacaagcctgtttgagagctttgaaagattggggtggtgataagggtgatattacccatatagtttctgttacctccaccggtattatcatcccagatgttaatttcaagttgatcgacttgttgggcttgaacaaggatgttgaaagagtgtctttgaacctaatgggttgtttggctggtttgagttctttgagaactgctgcttctttggctaaggcttctccaagaaatagaattttggttgtctgtaccgaagtctgctccttgcatttttctaatactgatggtggtgatcaaatggtcgcctcttctatttttgctgatggttctgctgcttacattattggttgtaacccaagaattgaagaaaccccattatacgaagtcatgtgctccattaacagatctttcccaaataccgaaaacgccatggtttgggatttggaaaaagaaggttggaacttgggtttggatgcttctattccaattgtcattggttctggtattgaagccttcgttgatactttgttggataaggctaagttgcaaacttccactgctatttctgctaaggattgcgaattcttgattcatactggtggcaagtccatcttgatgaacatcgaaaattccttgggtatcgacccaaagcaaactaagaatacttgggatgtttaccatgcctacggcaatatgtcatctgcctctgttattttcgttatggatcatgccagaaagtccaagtctttgccaacttactcaatttctttggcttttggtccaggtttggcttttgaaggttgtttcttgaagaacgtcgtctgaacagaagacgggagacactagcacacaactttaccaggcaaggtatttgacgctagcatgtgtccaattcagtgtcatttatgattttttgtagtaggatataaatatatacagcgctccaaatagtgcggttgccccaaaaacaccacggaacctcatctgttctcgtactttgttgtgacaaagtagctcactgccttattatcacattttcattatgcaacgcttcggaaaatacgatgttgaaaatgcctctagagatgaaaaacaatcgtaaaagggtcctgcgtaattgaaacatttgatcagtatgcagtggcacagaaacaaccaggaatactatagtcataggcaatacaaggtatatattggctatgcagacccctccagaaagtaccgacgtcaagttagatacacttaacgaacctagtgcacatttaattgagaaaaatgtggctcttcctaaggacatattccgttcgtacttgagttattggatctatgaaatcgctcgctatacaccagtcatgattttgtctatgtgttgctcttaaaatatttggatacgacatcctttatcttttttcctttaagagcaggatataagccatcaagtttctgaaaatcaaaatggtagcaacaataatgcagacgacaacaactgtgctgacgacagtcgccgcaatgtctactaccttagcatcaaattacatatcttcgcaagctagtt

SEQ ID NO: 145 - DNA, 11300 bp, Artificial Sequence
  DiPKS-3
cgggttacagtcatcgttgaaaacgatggaaaaacatgtcgagattcctcaatccatacaccattatagtccgttttatcagcttccactaattttttaaatctcagtttcttcttgaaatttagcatcgtgcatgggatagcggctagtaaaaaagaaaattaatatctcattaacaaagttattgtacataatccggtacaatattcttcaatgtactctctaatatcgagcacactggcaatattcatgcacacattcgcctaatgctgacgaatgcttaatcagtgcaattaagcaacaggcgcgttggacttttaattttcgaggaccgcgaatccttacatcacacccaatcccccacaagtgatcccccacacaccatagcttcaaaatgtttctactccttttttactcttccagattttctcggactccgcgcatcgccgtaccacttcaaaacacccaagcacagcatactaaatttcccctctttcttcctctagggtgtcgttaattacccgtactaaaggtttggaaaagaaaaaagagaccgcctcgtttctttttcttcgtcgaaaaaggcaataaaaatttttatcacgtttctttttcttgaaaatttttttttttgatttttttctctttcgatgacctcccattgatatttaagttaataaacggtcttcaatttctcaagtttcagtttcatttttcttgttctattacaactttttttacttcttgctcattagaaagaaagcatagcaatctaatctaagttttaataaacaatgaacaagaactccaaaatccagtccccaaactcttctgatgttgctgttattggtgttggttttagattcccaggtaactctaatgacccagaatctttgtggaacaacttgttggatggtttcgatgctattacccaagtcccaaaagaaagatgggctacttcttttagagagatgggtttgatcaagaacaagttcggtggtttcttgaaggattctgaatggaagaatttcgaccctttgttctttggtatcggtccaaaagaagctccattcattgatccacaacaaaggttgttgttgtccatcgtttgggaatctttggaagatgcttacatcagaccagatgaattgagaggttctaacactggtgttttcatcggtgtttctaacaacgattacaccaagttgggtttccaagacaactactctatttctccatacactatgaccggctctaactcttcattgaactccaacagaatttcctactgcttcgattttagaggtccatccattactgttgataccgcttgttcttcttccttggtttctgttaatttgggtgtccaatccatccaaatgggtgaatgtaagattgctatttgcggtggtgttaacgctttgtttgatccatctacatctgttgccttttccaagttgggtgttttgtctgaaaatggcagatgcaactcttttagtgatcaagcctctggttacgttagatctgaaggtgctggtgttgttgttttgaagtctttggaacaagctaagttggatggtgatagaatctacggtgttatcaagggtgtttcctctaatgaagatggtgcttctaatggtgacaagaactctttgactactccatcttgtgaagcccaatccattaacatttctaaggctatggaaaaggcctccttgtctccatctgatatctattacattgaagcccatggtactggtactccagttggtgatccaattgaagttaaggccttgtccaagatcttctccaactctaacaacaaccagttgaacaacttctctaccgatggtaatgataacgatgatgatgatgacgataacacctctccagaaccattattgattggctcattcaagtccaacatcggtcatttggaatctgctgctggtattgcttctttgattaagtgttgcttgatgttgaagaacaggatgttggttccatccattaactgctctaatttgaacccatccattccattcgatcagtacaacatctccgttatcagagaaatcagacaattcccaaccgataagttggttaacatcggtatcaattctttcggtttcggtggttctaactgccatttgattattcaagagtacaacaacaacttcaagaacaactctaccatctgcaataacaacaacaacaacaataacaacatcgactacttgatcccaatctcctctaagactaagaagtccttggataagtacttgattttgatcaagaccaactccaactaccacaaggatatttctttcgatgacttcgtcaagttccaaatcaagtctaagcagtacaacttgtccaacagaatgactaccattgctaacgattggaactccttcattaagggttctaacgaattccacaacttgatcgaatctaaggatggtgaaggtggttcttcatcttctaacagaggtattgattccgccaatcaaatcaacactactactacctctaccatcaacgatatcgaacctttgttggttttcgttttctgtggtcaaggtccacaatggaatggtatgattaagaccttgtacaactccgagaacgttttcaagaacaccgttgatcatgttgacagcatcttgtacaagtacttcggttactccattttgaacgtcttgtctaagatcgatgataacgacgattccatcaaccatccaatagttgctcaaccatctttgttcttgttgcaaattggtttggtcgagttgtttaagtactggggtatctacccatctatctctgttggtcattctttcggtgaagtctcttcttattacttgtccggtatcatctctttggaaaccgcttgtaaaatcgtctacgtcagatcctctaatcagaacaaaactatgggttccggtaagatgttggttgtttctatgggttttaagcaatggaacgatcaattctctgctgaatggtccgatattgaaattgcttgttacaacgctccagattccatagttgttactggtaacgaagaaagattgaaagaattgtccatcaagttgtccgacgaatccaatcaaattttcaacaccttcttgaggtccccatgttcttttcattcttcccatcaagaagtcatcaagggttctatgttcgaagagttgtctaacttgcaatctactggtgaaaccgaaatccctttgttctctactgttactggtagacaagttttgtctggtcatgttactgctcaacacatctacgataatgttagagaaccagtcttgttccaaaagacgattgaatccattacctcctacatcaagtctcactacccatccaatcaaaaggttatctacgttgaaattgctccacacccaaccttgttttcattgatcaaaaagtccatcccatcctccaacaagaattcctcttctgttttgtgtccattgaacagaaaagaaaactccaacaactcctacaagaagttcgtttctcagttgtacttcaacggtgttaacgttgacttcaacttccagttgaactccatttgcgataacgttaacaacgatcaccatttgaacaacgtcaagcaaaactccttcaaagagactaccaattccttgccaagataccaatgggaacaagatgaatattggtccgaaccattgatctccagaaagaatagattggaaggtccaactacttccttgttgggtcatagaattatctacagcttcccagttttccaatccgttttggacttgcaatctgacaactacaaatacttgttggaccacttggttaacggtaagccagtttttccaggtgctggttatttggatatcatcatcgaattcttcgactaccaaaagcagcagttgaattcctctgattcctctaactcctacatcatcaacgttgacaagatccaattcttgaacccaattcacttgaccgaaaacaagttgcaaaccttgcaatcttctttcgaacctatcgttactaagaagtctgccttctctgttaacttcttcatcaaggataccgtcgaggatcaatctaaggttaagtctatgtctgacgaaacttggactaacacttgtaaggctaccatttccttggaacaacaacagccatctccatcttctactttgactttgtctaagaagcaagacttgcagatcttgagaaacagatgcgatattagcaagctagacaagtttgagttgtacgacaagatctctaagaatttgggcttgcagtacaactccttgtttcaagttgttgataccatcgaaactggtaaggattgctcttttgctactttgtctttgccagaagatactttgttcaccaccattttgaacccatgcttgttggataactgtttccatggtttgttgaccttgatcaacgaaaagggttctttcgttgtcgagtccatttcttctgtttctatctacttggagaacatcggttccttcaatcaaacttctgttggtaacgtccagttctacttgtacaccactatttctaaagccacctcctttagttctgaaggtacttgtaagttgttcaccaaggatggttccttgattttgtctatcggtaagttcatcatcaagtccaccaatccaaagtctactaagaccaacgaaactatcgaatctccattggacgaaaccttctctattgaatggcaatctaaggattctccaattccaaccccacaacaaatccaacaacaatctccattgaactctaacccatccttcattagatctaccatcttgaaggacatccagttcgaacaatactgctcctccattatccacaaagaattgatcaaccacgaaaagtacaagaaccagcaatccttcgatatcaactccttggaaaaccacttgaacgatgaccaattgatggaatccttgtccatctccaaagaatacttgagattcttcaccaggatcatctccatcattaagcaatacccaaagatcttgaacgaaaaagagctaaaagaattgaaagaaatcatcgaattgaagtacccatccgaagttcagttgttggaattcgaagttatcgagaaggtgtccatgattatcccaaagttgttgttcgaaaacgacaagcaatcttccatgaccttgttccaagataacttgttgaccaggttctactccaattctaactctaccagattctacttggaaagggtttccgaaatggtcttggaatctattagaccaatcgtcagagaaaagagggtgttcagaattttagagatcggtgctcgtacaggctctttgtctaatgttgttttgactaagttgaacacctacttgtccaccttgaattctaatggtggttctggttacaacatcatcattgagtacaccttcaccgatatttccgccaacttcattattggtgaaatccaagaaaccatgtgcaacttgtacccaaacgttactttcaagttctccgtcttggacttggagaaagagattattaactcctccgatttcttgatgggtgattacgatatagttttgatggcctacgttatccatgccgtttctaacattaagttctccatcgaacagttgtacaagttgttgtctccaagaggttggttgttgtgtattgaacctaagtccaacgttgtgttctccgatttggttttcggttgttttaatcagtggtggaactactacgatgatattagaactacccactgctccttgtctgaatctcaatggaatcagttgttgttgaaccagtccttgaacaacgaatcctcttcttcttctaactgttacggtggtttctccaacgtttcttttattggtggtgaaaaggatgtcgactcccattctttcatattgcactgccaaaaagaatccatctcccaaatgaagttagccaccactattaacaacggtttgtcatctggttccatcgttatcgttttgaactctcaacaattgaccaacatgaagtcctacccaaaggttattgagtatattcaagaggctacctctttgtgcaagaccattgaaattatcgattccaaggacgtcttgaactctaccaattcagttttggaaaagatccaaaagtccttgttggtgttctgtttgttgggttatgacttgttggagaacaactaccaagaacagtctttcgaatacgttaagttgttgaacttgatctctactaccgcctcttcatctaatgataagaaaccaccaaaggtcttgttgatcaccaagcaatctgaaagaatctccaggtctttctactccagatccttgattggtatttccagaacctctatgaacgagtacccaaatttgtccattacctctatcgatttggataccaacgactactcattgcagtctttgttgaagccaatcttcagcaactctaagttttccgacaacgagttcatcttcaaaaagggcttgatgttcgtgtccaggatctttaagaacaagcagttgctagaatcctccaacgcttttgaaactgactcttctaacttgtactgtaaggcctcttctgacttgtcttacaagtacgctattaagcagtctatgttgaccgaaaatcagatcgaaatcaaggttgaatgcgtcggtattaacttcaaggacaacctattctacaagggcttgttgccacaagaaattttcagaatgggtgacatctacaatccaccatatggtttggaatgctctggtgttattaccagaattggttctaacgtcaccgaatactcagttggtcaaaatgtttttggtttcgccagacattctttgggttctcatgttgttaccaacaaggatttggttatcttgaagccagataccatctcattttctgaagctgcttctatcccagttgtttactgtactgcttggtactccttgttcaacattggtcagttgtctaacgaagaatccatcctaattcattctgctactggtggtgtaggtttggcttctttgaatttgttgaaaatgaagaatcagcaacagcaaccattgaccaatgtttatgctactgttggctctaacgagaagaagaagttcttgatcgataacttcaacaacttgttcaaagaggacggcgaaaacattttctctaccagagacaaagaatactccaaccagttggaatccaagatcgatgttattttgaacaccttgtccggtgaattcgtcgaatctaatttcaagtccttgagatccttcggtagattgattgatttgtctgctactcacgtttacgccaatcaacaaattggtctaggtaacttcaagttcgaccacttgtattctgctgttgacttggaaagattgatcgacgaaaaacctaagttgttgcagtccatcttgcaaagaattaccaactctatcgtcaacggttccttggaaaaaattccaattaccatcttcccatccaccgaaactaaggatgctatcgaattattgtccaagagatcccatatcggtaaagttgttgtagattgcaccgatatctctaagtgtaatcctgttggtgatgtgatcaccaacttctctatgagattgccaaagccaaactaccagttgaatttgaactccaccttgttgattactggtcagtctggtttgtctatccctttgttgaattggttgttgtctaagtctggtggtaacgttaagaacgttgtcatcatttctaagtccaccatgaagtggaagttgcagactatgatttcccatttcgtttccggtttcggtatccattttaactacgttcaagtcgacatctccaactacgatgctttgtctgaagctattaagcaattgccatctgatttgccaccaatcacctctgtttttcatttggctgctatctacaacgatgttccaatggatcaagttaccatgtctaccgttgaatctgttcataaccctaaagttttgggtgccgttaacttgcatagaatctctgtttcttttggttggaagttgaaccacttcgtcttgttctcttctattactgctattaccggttacccagaccaatctatctacaattctgccaactctattttggacgctttgtccaactttagaaggtttatgggtttgccatccttctccattaacttgggtccaatgaaggatgaaggtaaggtttctaccaacaagagcatcaagaagctattcaagtctagaggtttgccaagcctatccttgaacaagttatttggtttgttggaggtcgtcatcaacaacccatctaatcatgttatcccatcccaattgatttgctccccaatcgatttcaagacctacatcgaatctttctcaactatgaggccaaagttgttacacttgcaacctaccatttccaagcagcaatcttctatcattaacgattctaccaaggcttcctccaacatttcattgcaagataagatcacctccaaggtgtctgatttgttgtccattccaatctccaagatcaacttcgatcatccattgaaacactacggcttggattctttgttgaccgttcaattcaaatcctggatcgacaaagaattcgaaaagaacttgttcacccatatccaattggccaccatctctattaactcattcttggaaaaggtgaacggcttgtctacaaacaataacaacaacaacaattccaacgtcaagtcctctccatccattgtcaaagaagaaatcgttaccttggacaaggatcaacaaccattgctattgaaagaacaccagcacattatcatctccccagatattagaatcaacaagccaaagagggaatccttgattagaaccccaatcttgaacaaattcaaccagatcaccgaatccattatcactccatctacaccatctttgtcccaatccgatgttttgaaaactccaccaatcaagtctttgaacaacactaagaactccagcttgattaacaccccaccaattcaatctgtccaacaacatcaaaagcaacaacaaaaggtccaagtcatccaacaacagcaacaaccattatccagattgtcctacaagagcaacaacaactctttcgttttgggtatcggtatttctgttccaggtgaacctatttcccaacaatccttgaaagactccatctccaatgacttttctgataaggctgaaactaacgagaaggtcaagagaatctttgagcaatctcaaatcaagaccagacacttggttagagattacactaagccagagaactccatcaagttcagacatttggaaaccattaccgatgtgaacaaccagttcaagaaagttgttccagatttggctcaacaagcctgtttgagagctttgaaagattggggtggtgataagggtgatattacccatatagtttctgttacctccaccggtattatcatcccagatgttaatttcaagttgatcgacttgttgggcttgaacaaggatgttgaaagagtgtctttgaacctaatgggttgtttggctggtttgagttctttgagaactgctgcttctttggctaaggcttctccaagaaatagaattttggttgtctgtaccgaagtctgctccttgcatttttctaatactgatggtggtgatcaaatggtcgcctcttctatttttgctgatggttctgctgcttacattattggttgtaacccaagaattgaagaaaccccattatacgaagtcatgtgctccattaacagatctttcccaaataccgaaaacgccatggtttgggatttggaaaaagaaggttggaacttgggtttggatgcttctattccaattgtcattggttctggtattgaagccttcgttgatactttgttggataaggctaagttgcaaacttccactgctatttctgctaaggattgcgaattcttgattcatactggtggcaagtccatcttgatgaacatcgaaaattccttgggtatcgacccaaagcaaactaagaatacttgggatgtttaccatgcctacggcaatatgtcatctgcctctgttattttcgttatggatcatgccagaaagtccaagtctttgccaacttactcaatttctttggcttttggtccaggtttggcttttgaaggttgtttcttgaagaacgtcgtctgaacagaagacgggagacactagcacacaactttaccaggcaaggtatttgacgctagcatgtgtccaattcagtgtcatttatgattttttgtagtaggatataaatatatacagcgctccaaatagtgcggttgccccaaaaacaccacggaacctcatctgttctcgtactttgttgtgacaaagtagctcactgccttattatcacattttcattatgcaacgcttcggaaaatacgatgttgaaaatgcctctagagatgaaaaacaatcgtaaaagggtcctgcgtaattgaaacatttgatcagtatgcagtggcacagaaacaaccaggaatactatagtcataggcaatacaaggtatatattggctatgcagacccctccagaaagtaccgacgtcaagttagatacacttaacgaacctagtgcacatttaattgagaaaaatgtggctcttcctaaggacatattccgttcgtacttgagttattggatctatgaaatcgctcgctatacaccagtcatgattttgtctgagatcgacttgcatcaacctttgaaaaatataaggatgagaaagtgaaatcggttttttttttccattgtcgtcatcaacatgattttttaaataaataaatacgattttttattttttttcccttctttgtttttgttttgcttattcccatcttcattattaaattcttccgctcttaataaaggagtttttttattatcttcttgtgtaatcatcctttttctttaattttcttccttttctttttctctttactggtttttttacttctttattctcaaccatctaaagaatattattgctttctaccaataaaatctgttaattctatttggattgtcgtctactcaagtctcgcctagtaaataaacgataaacaaatttgaagtaagaataacaatatagggagagaaatttttctatttttaatttcgaaacaggtaccaaaaaatctaagttcactttagcactatttgggaaagcttttatataaaaaatctgaaacaaaatcatatcaaag

SEQ ID NO: 146 - DNA, 11140 bp, Artificial Sequence
  DiPKS-4
cggcacccaccataaagattactttagcgttggggttgcttttcatatgagcagcgatcttcctaaccgacatctctgtagaggcggtagaaacagacatcgaaacacggagagatcgcggtacgtctggttggtagctcagtgacgggcacagatagcgacatttactgatacagagacagttacgaaagatggaaacacatgcagagaatgtggtctattccttattcttaagatcggcgaagctaacagagttaatgctgggccatagctggacggcagaaagcacgcaggaagcaacaggcgcgttggacttttaattttcgaggaccgcgaatccttacatcacacccaatcccccacaagtgatcccccacacaccatagcttcaaaatgtttctactccttttttactcttccagattttctcggactccgcgcatcgccgtaccacttcaaaacacccaagcacagcatactaaatttcccctctttcttcctctagggtgtcgttaattacccgtactaaaggtttggaaaagaaaaaagagaccgcctcgtttctttttcttcgtcgaaaaaggcaataaaaatttttatcacgtttctttttcttgaaaatttttttttttgatttttttctctttcgatgacctcccattgatatttaagttaataaacggtcttcaatttctcaagtttcagtttcatttttcttgttctattacaactttttttacttcttgctcattagaaagaaagcatagcaatctaatctaagttttaataaacaatgaacaagaactccaaaatccagtccccaaactcttctgatgttgctgttattggtgttggttttagattcccaggtaactctaatgacccagaatctttgtggaacaacttgttggatggtttcgatgctattacccaagtcccaaaagaaagatgggctacttcttttagagagatgggtttgatcaagaacaagttcggtggtttcttgaaggattctgaatggaagaatttcgaccctttgttctttggtatcggtccaaaagaagctccattcattgatccacaacaaaggttgttgttgtccatcgtttgggaatctttggaagatgcttacatcagaccagatgaattgagaggttctaacactggtgttttcatcggtgtttctaacaacgattacaccaagttgggtttccaagacaactactctatttctccatacactatgaccggctctaactcttcattgaactccaacagaatttcctactgcttcgattttagaggtccatccattactgttgataccgcttgttcttcttccttggtttctgttaatttgggtgtccaatccatccaaatgggtgaatgtaagattgctatttgcggtggtgttaacgctttgtttgatccatctacatctgttgccttttccaagttgggtgttttgtctgaaaatggcagatgcaactcttttagtgatcaagcctctggttacgttagatctgaaggtgctggtgttgttgttttgaagtctttggaacaagctaagttggatggtgatagaatctacggtgttatcaagggtgtttcctctaatgaagatggtgcttctaatggtgacaagaactctttgactactccatcttgtgaagcccaatccattaacatttctaaggctatggaaaaggcctccttgtctccatctgatatctattacattgaagcccatggtactggtactccagttggtgatccaattgaagttaaggccttgtccaagatcttctccaactctaacaacaaccagttgaacaacttctctaccgatggtaatgataacgatgatgatgatgacgataacacctctccagaaccattattgattggctcattcaagtccaacatcggtcatttggaatctgctgctggtattgcttctttgattaagtgttgcttgatgttgaagaacaggatgttggttccatccattaactgctctaatttgaacccatccattccattcgatcagtacaacatctccgttatcagagaaatcagacaattcccaaccgataagttggttaacatcggtatcaattctttcggtttcggtggttctaactgccatttgattattcaagagtacaacaacaacttcaagaacaactctaccatctgcaataacaacaacaacaacaataacaacatcgactacttgatcccaatctcctctaagactaagaagtccttggataagtacttgattttgatcaagaccaactccaactaccacaaggatatttctttcgatgacttcgtcaagttccaaatcaagtctaagcagtacaacttgtccaacagaatgactaccattgctaacgattggaactccttcattaagggttctaacgaattccacaacttgatcgaatctaaggatggtgaaggtggttcttcatcttctaacagaggtattgattccgccaatcaaatcaacactactactacctctaccatcaacgatatcgaacctttgttggttttcgttttctgtggtcaaggtccacaatggaatggtatgattaagaccttgtacaactccgagaacgttttcaagaacaccgttgatcatgttgacagcatcttgtacaagtacttcggttactccattttgaacgtcttgtctaagatcgatgataacgacgattccatcaaccatccaatagttgctcaaccatctttgttcttgttgcaaattggtttggtcgagttgtttaagtactggggtatctacccatctatctctgttggtcattctttcggtgaagtctcttcttattacttgtccggtatcatctctttggaaaccgcttgtaaaatcgtctacgtcagatcctctaatcagaacaaaactatgggttccggtaagatgttggttgtttctatgggttttaagcaatggaacgatcaattctctgctgaatggtccgatattgaaattgcttgttacaacgctccagattccatagttgttactggtaacgaagaaagattgaaagaattgtccatcaagttgtccgacgaatccaatcaaattttcaacaccttcttgaggtccccatgttcttttcattcttcccatcaagaagtcatcaagggttctatgttcgaagagttgtctaacttgcaatctactggtgaaaccgaaatccctttgttctctactgttactggtagacaagttttgtctggtcatgttactgctcaacacatctacgataatgttagagaaccagtcttgttccaaaagacgattgaatccattacctcctacatcaagtctcactacccatccaatcaaaaggttatctacgttgaaattgctccacacccaaccttgttttcattgatcaaaaagtccatcccatcctccaacaagaattcctcttctgttttgtgtccattgaacagaaaagaaaactccaacaactcctacaagaagttcgtttctcagttgtacttcaacggtgttaacgttgacttcaacttccagttgaactccatttgcgataacgttaacaacgatcaccatttgaacaacgtcaagcaaaactccttcaaagagactaccaattccttgccaagataccaatgggaacaagatgaatattggtccgaaccattgatctccagaaagaatagattggaaggtccaactacttccttgttgggtcatagaattatctacagcttcccagttttccaatccgttttggacttgcaatctgacaactacaaatacttgttggaccacttggttaacggtaagccagtttttccaggtgctggttatttggatatcatcatcgaattcttcgactaccaaaagcagcagttgaattcctctgattcctctaactcctacatcatcaacgttgacaagatccaattcttgaacccaattcacttgaccgaaaacaagttgcaaaccttgcaatcttctttcgaacctatcgttactaagaagtctgccttctctgttaacttcttcatcaaggataccgtcgaggatcaatctaaggttaagtctatgtctgacgaaacttggactaacacttgtaaggctaccatttccttggaacaacaacagccatctccatcttctactttgactttgtctaagaagcaagacttgcagatcttgagaaacagatgcgatattagcaagctagacaagtttgagttgtacgacaagatctctaagaatttgggcttgcagtacaactccttgtttcaagttgttgataccatcgaaactggtaaggattgctcttttgctactttgtctttgccagaagatactttgttcaccaccattttgaacccatgcttgttggataactgtttccatggtttgttgaccttgatcaacgaaaagggttctttcgttgtcgagtccatttcttctgtttctatctacttggagaacatcggttccttcaatcaaacttctgttggtaacgtccagttctacttgtacaccactatttctaaagccacctcctttagttctgaaggtacttgtaagttgttcaccaaggatggttccttgattttgtctatcggtaagttcatcatcaagtccaccaatccaaagtctactaagaccaacgaaactatcgaatctccattggacgaaaccttctctattgaatggcaatctaaggattctccaattccaaccccacaacaaatccaacaacaatctccattgaactctaacccatccttcattagatctaccatcttgaaggacatccagttcgaacaatactgctcctccattatccacaaagaattgatcaaccacgaaaagtacaagaaccagcaatccttcgatatcaactccttggaaaaccacttgaacgatgaccaattgatggaatccttgtccatctccaaagaatacttgagattcttcaccaggatcatctccatcattaagcaatacccaaagatcttgaacgaaaaagagctaaaagaattgaaagaaatcatcgaattgaagtacccatccgaagttcagttgttggaattcgaagttatcgagaaggtgtccatgattatcccaaagttgttgttcgaaaacgacaagcaatcttccatgaccttgttccaagataacttgttgaccaggttctactccaattctaactctaccagattctacttggaaagggtttccgaaatggtcttggaatctattagaccaatcgtcagagaaaagagggtgttcagaattttagagatcggtgctcgtacaggctctttgtctaatgttgttttgactaagttgaacacctacttgtccaccttgaattctaatggtggttctggttacaacatcatcattgagtacaccttcaccgatatttccgccaacttcattattggtgaaatccaagaaaccatgtgcaacttgtacccaaacgttactttcaagttctccgtcttggacttggagaaagagattattaactcctccgatttcttgatgggtgattacgatatagttttgatggcctacgttatccatgccgtttctaacattaagttctccatcgaacagttgtacaagttgttgtctccaagaggttggttgttgtgtattgaacctaagtccaacgttgtgttctccgatttggttttcggttgttttaatcagtggtggaactactacgatgatattagaactacccactgctccttgtctgaatctcaatggaatcagttgttgttgaaccagtccttgaacaacgaatcctcttcttcttctaactgttacggtggtttctccaacgtttcttttattggtggtgaaaaggatgtcgactcccattctttcatattgcactgccaaaaagaatccatctcccaaatgaagttagccaccactattaacaacggtttgtcatctggttccatcgttatcgttttgaactctcaacaattgaccaacatgaagtcctacccaaaggttattgagtatattcaagaggctacctctttgtgcaagaccattgaaattatcgattccaaggacgtcttgaactctaccaattcagttttggaaaagatccaaaagtccttgttggtgttctgtttgttgggttatgacttgttggagaacaactaccaagaacagtctttcgaatacgttaagttgttgaacttgatctctactaccgcctcttcatctaatgataagaaaccaccaaaggtcttgttgatcaccaagcaatctgaaagaatctccaggtctttctactccagatccttgattggtatttccagaacctctatgaacgagtacccaaatttgtccattacctctatcgatttggataccaacgactactcattgcagtctttgttgaagccaatcttcagcaactctaagttttccgacaacgagttcatcttcaaaaagggcttgatgttcgtgtccaggatctttaagaacaagcagttgctagaatcctccaacgcttttgaaactgactcttctaacttgtactgtaaggcctcttctgacttgtcttacaagtacgctattaagcagtctatgttgaccgaaaatcagatcgaaatcaaggttgaatgcgtcggtattaacttcaaggacaacctattctacaagggcttgttgccacaagaaattttcagaatgggtgacatctacaatccaccatatggtttggaatgctctggtgttattaccagaattggttctaacgtcaccgaatactcagttggtcaaaatgtttttggtttcgccagacattctttgggttctcatgttgttaccaacaaggatttggttatcttgaagccagataccatctcattttctgaagctgcttctatcccagttgtttactgtactgcttggtactccttgttcaacattggtcagttgtctaacgaagaatccatcctaattcattctgctactggtggtgtaggtttggcttctttgaatttgttgaaaatgaagaatcagcaacagcaaccattgaccaatgtttatgctactgttggctctaacgagaagaagaagttcttgatcgataacttcaacaacttgttcaaagaggacggcgaaaacattttctctaccagagacaaagaatactccaaccagttggaatccaagatcgatgttattttgaacaccttgtccggtgaattcgtcgaatctaatttcaagtccttgagatccttcggtagattgattgatttgtctgctactcacgtttacgccaatcaacaaattggtctaggtaacttcaagttcgaccacttgtattctgctgttgacttggaaagattgatcgacgaaaaacctaagttgttgcagtccatcttgcaaagaattaccaactctatcgtcaacggttccttggaaaaaattccaattaccatcttcccatccaccgaaactaaggatgctatcgaattattgtccaagagatcccatatcggtaaagttgttgtagattgcaccgatatctctaagtgtaatcctgttggtgatgtgatcaccaacttctctatgagattgccaaagccaaactaccagttgaatttgaactccaccttgttgattactggtcagtctggtttgtctatccctttgttgaattggttgttgtctaagtctggtggtaacgttaagaacgttgtcatcatttctaagtccaccatgaagtggaagttgcagactatgatttcccatttcgtttccggtttcggtatccattttaactacgttcaagtcgacatctccaactacgatgctttgtctgaagctattaagcaattgccatctgatttgccaccaatcacctctgtttttcatttggctgctatctacaacgatgttccaatggatcaagttaccatgtctaccgttgaatctgttcataaccctaaagttttgggtgccgttaacttgcatagaatctctgtttcttttggttggaagttgaaccacttcgtcttgttctcttctattactgctattaccggttacccagaccaatctatctacaattctgccaactctattttggacgctttgtccaactttagaaggtttatgggtttgccatccttctccattaacttgggtccaatgaaggatgaaggtaaggtttctaccaacaagagcatcaagaagctattcaagtctagaggtttgccaagcctatccttgaacaagttatttggtttgttggaggtcgtcatcaacaacccatctaatcatgttatcccatcccaattgatttgctccccaatcgatttcaagacctacatcgaatctttctcaactatgaggccaaagttgttacacttgcaacctaccatttccaagcagcaatcttctatcattaacgattctaccaaggcttcctccaacatttcattgcaagataagatcacctccaaggtgtctgatttgttgtccattccaatctccaagatcaacttcgatcatccattgaaacactacggcttggattctttgttgaccgttcaattcaaatcctggatcgacaaagaattcgaaaagaacttgttcacccatatccaattggccaccatctctattaactcattcttggaaaaggtgaacggcttgtctacaaacaataacaacaacaacaattccaacgtcaagtcctctccatccattgtcaaagaagaaatcgttaccttggacaaggatcaacaaccattgctattgaaagaacaccagcacattatcatctccccagatattagaatcaacaagccaaagagggaatccttgattagaaccccaatcttgaacaaattcaaccagatcaccgaatccattatcactccatctacaccatctttgtcccaatccgatgttttgaaaactccaccaatcaagtctttgaacaacactaagaactccagcttgattaacaccccaccaattcaatctgtccaacaacatcaaaagcaacaacaaaaggtccaagtcatccaacaacagcaacaaccattatccagattgtcctacaagagcaacaacaactctttcgttttgggtatcggtatttctgttccaggtgaacctatttcccaacaatccttgaaagactccatctccaatgacttttctgataaggctgaaactaacgagaaggtcaagagaatctttgagcaatctcaaatcaagaccagacacttggttagagattacactaagccagagaactccatcaagttcagacatttggaaaccattaccgatgtgaacaaccagttcaagaaagttgttccagatttggctcaacaagcctgtttgagagctttgaaagattggggtggtgataagggtgatattacccatatagtttctgttacctccaccggtattatcatcccagatgttaatttcaagttgatcgacttgttgggcttgaacaaggatgttgaaagagtgtctttgaacctaatgggttgtttggctggtttgagttctttgagaactgctgcttctttggctaaggcttctccaagaaatagaattttggttgtctgtaccgaagtctgctccttgcatttttctaatactgatggtggtgatcaaatggtcgcctcttctatttttgctgatggttctgctgcttacattattggttgtaacccaagaattgaagaaaccccattatacgaagtcatgtgctccattaacagatctttcccaaataccgaaaacgccatggtttgggatttggaaaaagaaggttggaacttgggtttggatgcttctattccaattgtcattggttctggtattgaagccttcgttgatactttgttggataaggctaagttgcaaacttccactgctatttctgctaaggattgcgaattcttgattcatactggtggcaagtccatcttgatgaacatcgaaaattccttgggtatcgacccaaagcaaactaagaatacttgggatgtttaccatgcctacggcaatatgtcatctgcctctgttattttcgttatggatcatgccagaaagtccaagtctttgccaacttactcaatttctttggcttttggtccaggtttggcttttgaaggttgtttcttgaagaacgtcgtctgaacagaagacgggagacactagcacacaactttaccaggcaaggtatttgacgctagcatgtgtccaattcagtgtcatttatgattttttgtagtaggatataaatatatacagcgctccaaatagtgcggttgccccaaaaacaccacggaacctcatctgttctcgtactttgttgtgacaaagtagctcactgccttattatcacattttcattatgcaacgcttcggaaaatacgatgttgaaaatgcctctagagatgaaaaacaatcgtaaaagggtcctgcgtaattgaaacatttgatcagtatgcagtggcacagaaacaaccaggaatactatagtcataggcaatacaaggtatatattggctatgcagacccctccagaaagtaccgacgtcaagttagatacacttaacgaacctagtgcacatttaattgagaaaaatgtggctcttcctaaggacatattccgttcgtacttgagttattggatctatgaaatcgctcgctatacaccagtcatgattttgtcgaagacatatgcccactttgggaaatagaaatggtcattttaagctcaagtgaagcgaaaaaaggaggtatactcctttacgcgtcacccaatctggataggcacgtcaaactcattaggtctcatcaagaactagtgtagaaatgacgcttgaactccgaactttaaacaaagttctgtttttgtttctgtttctgtttcctgttgctgtctctgtttctatttttttcgtatagctctatttcccttgtagataaacatatataagaatgctattatagaagcgtgtattttcctccccctagcttcaacctgtaattcccttcttagtaaagcgaactagaaccagtttaataggatataga

SEQ ID NO: 147 - DNA, 11637 bp, Artificial Sequence
  DiPKS-5
atgaacgctaatatatgggtggctgcttcagatggtaatttggaccgagtggaacatatcctccgcgagagtaaaggcgccatgaccccgcaatccaaggacattaacggctacactccaatgcatgctgccgccgcatacggccacctggatttgctgaagaaaatgtgcaatgagtacaatggagacattaatgtgttggacaacgacggcgataccccgttgcaccatgtggaggatgtggccactgccaggttgatcgtggaagagctgggtggagacttcactatcaggaatgtggagggccaaacgccatacgactcgttcgtcgagaacggtgaagatggtgagctaatcgagtacatgaggattaagtccggcgtggccgatgttcacggagtggacggcgtgcagggtgagggtgtcatcgacagcaaattgctggaagagttcaaggacaacgtgagatacaccttggaaaatgaccctgaggaaggagccgatgaggccactctgcaacgcaggaggcagttggaacagatcattacgggagacaacgctgaggaggagttggaaaggtacatccgtgctatggtcagagagcagatgctgggccagggctccatggcgggttccggggacgaaccagattccaagagaagaaaataacgaaagcaacaggcgcgttggacttttaattttcgaggaccgcgaatccttacatcacacccaatcccccacaagtgatcccccacacaccatagcttcaaaatgtttctactccttttttactcttccagattttctcggactccgcgcatcgccgtaccacttcaaaacacccaagcacagcatactaaatttcccctctttcttcctctagggtgtcgttaattacccgtactaaaggtttggaaaagaaaaaagagaccgcctcgtttctttttcttcgtcgaaaaaggcaataaaaatttttatcacgtttctttttcttgaaaatttttttttttgatttttttctctttcgatgacctcccattgatatttaagttaataaacggtcttcaatttctcaagtttcagtttcatttttcttgttctattacaactttttttacttcttgctcattagaaagaaagcatagcaatctaatctaagttttaataaacaatgaacaagaactccaaaatccagtccccaaactcttctgatgttgctgttattggtgttggttttagattcccaggtaactctaatgacccagaatctttgtggaacaacttgttggatggtttcgatgctattacccaagtcccaaaagaaagatgggctacttcttttagagagatgggtttgatcaagaacaagttcggtggtttcttgaaggattctgaatggaagaatttcgaccctttgttctttggtatcggtccaaaagaagctccattcattgatccacaacaaaggttgttgttgtccatcgtttgggaatctttggaagatgcttacatcagaccagatgaattgagaggttctaacactggtgttttcatcggtgtttctaacaacgattacaccaagttgggtttccaagacaactactctatttctccatacactatgaccggctctaactcttcattgaactccaacagaatttcctactgcttcgattttagaggtccatccattactgttgataccgcttgttcttcttccttggtttctgttaatttgggtgtccaatccatccaaatgggtgaatgtaagattgctatttgcggtggtgttaacgctttgtttgatccatctacatctgttgccttttccaagttgggtgttttgtctgaaaatggcagatgcaactcttttagtgatcaagcctctggttacgttagatctgaaggtgctggtgttgttgttttgaagtctttggaacaagctaagttggatggtgatagaatctacggtgttatcaagggtgtttcctctaatgaagatggtgcttctaatggtgacaagaactctttgactactccatcttgtgaagcccaatccattaacatttctaaggctatggaaaaggcctccttgtctccatctgatatctattacattgaagcccatggtactggtactccagttggtgatccaattgaagttaaggccttgtccaagatcttctccaactctaacaacaaccagttgaacaacttctctaccgatggtaatgataacgatgatgatgatgacgataacacctctccagaaccattattgattggctcattcaagtccaacatcggtcatttggaatctgctgctggtattgcttctttgattaagtgttgcttgatgttgaagaacaggatgttggttccatccattaactgctctaatttgaacccatccattccattcgatcagtacaacatctccgttatcagagaaatcagacaattcccaaccgataagttggttaacatcggtatcaattctttcggtttcggtggttctaactgccatttgattattcaagagtacaacaacaacttcaagaacaactctaccatctgcaataacaacaacaacaacaataacaacatcgactacttgatcccaatctcctctaagactaagaagtccttggataagtacttgattttgatcaagaccaactccaactaccacaaggatatttctttcgatgacttcgtcaagttccaaatcaagtctaagcagtacaacttgtccaacagaatgactaccattgctaacgattggaactccttcattaagggttctaacgaattccacaacttgatcgaatctaaggatggtgaaggtggttcttcatcttctaacagaggtattgattccgccaatcaaatcaacactactactacctctaccatcaacgatatcgaacctttgttggttttcgttttctgtggtcaaggtccacaatggaatggtatgattaagaccttgtacaactccgagaacgttttcaagaacaccgttgatcatgttgacagcatcttgtacaagtacttcggttactccattttgaacgtcttgtctaagatcgatgataacgacgattccatcaaccatccaatagttgctcaaccatctttgttcttgttgcaaattggtttggtcgagttgtttaagtactggggtatctacccatctatctctgttggtcattctttcggtgaagtctcttcttattacttgtccggtatcatctctttggaaaccgcttgtaaaatcgtctacgtcagatcctctaatcagaacaaaactatgggttccggtaagatgttggttgtttctatgggttttaagcaatggaacgatcaattctctgctgaatggtccgatattgaaattgcttgttacaacgctccagattccatagttgttactggtaacgaagaaagattgaaagaattgtccatcaagttgtccgacgaatccaatcaaattttcaacaccttcttgaggtccccatgttcttttcattcttcccatcaagaagtcatcaagggttctatgttcgaagagttgtctaacttgcaatctactggtgaaaccgaaatccctttgttctctactgttactggtagacaagttttgtctggtcatgttactgctcaacacatctacgataatgttagagaaccagtcttgttccaaaagacgattgaatccattacctcctacatcaagtctcactacccatccaatcaaaaggttatctacgttgaaattgctccacacccaaccttgttttcattgatcaaaaagtccatcccatcctccaacaagaattcctcttctgttttgtgtccattgaacagaaaagaaaactccaacaactcctacaagaagttcgtttctcagttgtacttcaacggtgttaacgttgacttcaacttccagttgaactccatttgcgataacgttaacaacgatcaccatttgaacaacgtcaagcaaaactccttcaaagagactaccaattccttgccaagataccaatgggaacaagatgaatattggtccgaaccattgatctccagaaagaatagattggaaggtccaactacttccttgttgggtcatagaattatctacagcttcccagttttccaatccgttttggacttgcaatctgacaactacaaatacttgttggaccacttggttaacggtaagccagtttttccaggtgctggttatttggatatcatcatcgaattcttcgactaccaaaagcagcagttgaattcctctgattcctctaactcctacatcatcaacgttgacaagatccaattcttgaacccaattcacttgaccgaaaacaagttgcaaaccttgcaatcttctttcgaacctatcgttactaagaagtctgccttctctgttaacttcttcatcaaggataccgtcgaggatcaatctaaggttaagtctatgtctgacgaaacttggactaacacttgtaaggctaccatttccttggaacaacaacagccatctccatcttctactttgactttgtctaagaagcaagacttgcagatcttgagaaacagatgcgatattagcaagctagacaagtttgagttgtacgacaagatctctaagaatttgggcttgcagtacaactccttgtttcaagttgttgataccatcgaaactggtaaggattgctcttttgctactttgtctttgccagaagatactttgttcaccaccattttgaacccatgcttgttggataactgtttccatggtttgttgaccttgatcaacgaaaagggttctttcgttgtcgagtccatttcttctgtttctatctacttggagaacatcggttccttcaatcaaacttctgttggtaacgtccagttctacttgtacaccactatttctaaagccacctcctttagttctgaaggtacttgtaagttgttcaccaaggatggttccttgattttgtctatcggtaagttcatcatcaagtccaccaatccaaagtctactaagaccaacgaaactatcgaatctccattggacgaaaccttctctattgaatggcaatctaaggattctccaattccaaccccacaacaaatccaacaacaatctccattgaactctaacccatccttcattagatctaccatcttgaaggacatccagttcgaacaatactgctcctccattatccacaaagaattgatcaaccacgaaaagtacaagaaccagcaatccttcgatatcaactccttggaaaaccacttgaacgatgaccaattgatggaatccttgtccatctccaaagaatacttgagattcttcaccaggatcatctccatcattaagcaatacccaaagatcttgaacgaaaaagagctaaaagaattgaaagaaatcatcgaattgaagtacccatccgaagttcagttgttggaattcgaagttatcgagaaggtgtccatgattatcccaaagttgttgttcgaaaacgacaagcaatcttccatgaccttgttccaagataacttgttgaccaggttctactccaattctaactctaccagattctacttggaaagggtttccgaaatggtcttggaatctattagaccaatcgtcagagaaaagagggtgttcagaattttagagatcggtgctcgtacaggctctttgtctaatgttgttttgactaagttgaacacctacttgtccaccttgaattctaatggtggttctggttacaacatcatcattgagtacaccttcaccgatatttccgccaacttcattattggtgaaatccaagaaaccatgtgcaacttgtacccaaacgttactttcaagttctccgtcttggacttggagaaagagattattaactcctccgatttcttgatgggtgattacgatatagttttgatggcctacgttatccatgccgtttctaacattaagttctccatcgaacagttgtacaagttgttgtctccaagaggttggttgttgtgtattgaacctaagtccaacgttgtgttctccgatttggttttcggttgttttaatcagtggtggaactactacgatgatattagaactacccactgctccttgtctgaatctcaatggaatcagttgttgttgaaccagtccttgaacaacgaatcctcttcttcttctaactgttacggtggtttctccaacgtttcttttattggtggtgaaaaggatgtcgactcccattctttcatattgcactgccaaaaagaatccatctcccaaatgaagttagccaccactattaacaacggtttgtcatctggttccatcgttatcgttttgaactctcaacaattgaccaacatgaagtcctacccaaaggttattgagtatattcaagaggctacctctttgtgcaagaccattgaaattatcgattccaaggacgtcttgaactctaccaattcagttttggaaaagatccaaaagtccttgttggtgttctgtttgttgggttatgacttgttggagaacaactaccaagaacagtctttcgaatacgttaagttgttgaacttgatctctactaccgcctcttcatctaatgataagaaaccaccaaaggtcttgttgatcaccaagcaatctgaaagaatctccaggtctttctactccagatccttgattggtatttccagaacctctatgaacgagtacccaaatttgtccattacctctatcgatttggataccaacgactactcattgcagtctttgttgaagccaatcttcagcaactctaagttttccgacaacgagttcatcttcaaaaagggcttgatgttcgtgtccaggatctttaagaacaagcagttgctagaatcctccaacgcttttgaaactgactcttctaacttgtactgtaaggcctcttctgacttgtcttacaagtacgctattaagcagtctatgttgaccgaaaatcagatcgaaatcaaggttgaatgcgtcggtattaacttcaaggacaacctattctacaagggcttgttgccacaagaaattttcagaatgggtgacatctacaatccaccatatggtttggaatgctctggtgttattaccagaattggttctaacgtcaccgaatactcagttggtcaaaatgtttttggtttcgccagacattctttgggttctcatgttgttaccaacaaggatttggttatcttgaagccagataccatctcattttctgaagctgcttctatcccagttgtttactgtactgcttggtactccttgttcaacattggtcagttgtctaacgaagaatccatcctaattcattctgctactggtggtgtaggtttggcttctttgaatttgttgaaaatgaagaatcagcaacagcaaccattgaccaatgtttatgctactgttggctctaacgagaagaagaagttcttgatcgataacttcaacaacttgttcaaagaggacggcgaaaacattttctctaccagagacaaagaatactccaaccagttggaatccaagatcgatgttattttgaacaccttgtccggtgaattcgtcgaatctaatttcaagtccttgagatccttcggtagattgattgatttgtctgctactcacgtttacgccaatcaacaaattggtctaggtaacttcaagttcgaccacttgtattctgctgttgacttggaaagattgatcgacgaaaaacctaagttgttgcagtccatcttgcaaagaattaccaactctatcgtcaacggttccttggaaaaaattccaattaccatcttcccatccaccgaaactaaggatgctatcgaattattgtccaagagatcccatatcggtaaagttgttgtagattgcaccgatatctctaagtgtaatcctgttggtgatgtgatcaccaacttctctatgagattgccaaagccaaactaccagttgaatttgaactccaccttgttgattactggtcagtctggtttgtctatccctttgttgaattggttgttgtctaagtctggtggtaacgttaagaacgttgtcatcatttctaagtccaccatgaagtggaagttgcagactatgatttcccatttcgtttccggtttcggtatccattttaactacgttcaagtcgacatctccaactacgatgctttgtctgaagctattaagcaattgccatctgatttgccaccaatcacctctgtttttcatttggctgctatctacaacgatgttccaatggatcaagttaccatgtctaccgttgaatctgttcataaccctaaagttttgggtgccgttaacttgcatagaatctctgtttcttttggttggaagttgaaccacttcgtcttgttctcttctattactgctattaccggttacccagaccaatctatctacaattctgccaactctattttggacgctttgtccaactttagaaggtttatgggtttgccatccttctccattaacttgggtccaatgaaggatgaaggtaaggtttctaccaacaagagcatcaagaagctattcaagtctagaggtttgccaagcctatccttgaacaagttatttggtttgttggaggtcgtcatcaacaacccatctaatcatgttatcccatcccaattgatttgctccccaatcgatttcaagacctacatcgaatctttctcaactatgaggccaaagttgttacacttgcaacctaccatttccaagcagcaatcttctatcattaacgattctaccaaggcttcctccaacatttcattgcaagataagatcacctccaaggtgtctgatttgttgtccattccaatctccaagatcaacttcgatcatccattgaaacactacggcttggattctttgttgaccgttcaattcaaatcctggatcgacaaagaattcgaaaagaacttgttcacccatatccaattggccaccatctctattaactcattcttggaaaaggtgaacggcttgtctacaaacaataacaacaacaacaattccaacgtcaagtcctctccatccattgtcaaagaagaaatcgttaccttggacaaggatcaacaaccattgctattgaaagaacaccagcacattatcatctccccagatattagaatcaacaagccaaagagggaatccttgattagaaccccaatcttgaacaaattcaaccagatcaccgaatccattatcactccatctacaccatctttgtcccaatccgatgttttgaaaactccaccaatcaagtctttgaacaacactaagaactccagcttgattaacaccccaccaattcaatctgtccaacaacatcaaaagcaacaacaaaaggtccaagtcatccaacaacagcaacaaccattatccagattgtcctacaagagcaacaacaactctttcgttttgggtatcggtatttctgttccaggtgaacctatttcccaacaatccttgaaagactccatctccaatgacttttctgataaggctgaaactaacgagaaggtcaagagaatctttgagcaatctcaaatcaagaccagacacttggttagagattacactaagccagagaactccatcaagttcagacatttggaaaccattaccgatgtgaacaaccagttcaagaaagttgttccagatttggctcaacaagcctgtttgagagctttgaaagattggggtggtgataagggtgatattacccatatagtttctgttacctccaccggtattatcatcccagatgttaatttcaagttgatcgacttgttgggcttgaacaaggatgttgaaagagtgtctttgaacctaatgggttgtttggctggtttgagttctttgagaactgctgcttctttggctaaggcttctccaagaaatagaattttggttgtctgtaccgaagtctgctccttgcatttttctaatactgatggtggtgatcaaatggtcgcctcttctatttttgctgatggttctgctgcttacattattggttgtaacccaagaattgaagaaaccccattatacgaagtcatgtgctccattaacagatctttcccaaataccgaaaacgccatggtttgggatttggaaaaagaaggttggaacttgggtttggatgcttctattccaattgtcattggttctggtattgaagccttcgttgatactttgttggataaggctaagttgcaaacttccactgctatttctgctaaggattgcgaattcttgattcatactggtggcaagtccatcttgatgaacatcgaaaattccttgggtatcgacccaaagcaaactaagaatacttgggatgtttaccatgcctacggcaatatgtcatctgcctctgttattttcgttatggatcatgccagaaagtccaagtctttgccaacttactcaatttctttggcttttggtccaggtttggcttttgaaggttgtttcttgaagaacgtcgtctgaacagaagacgggagacactagcacacaactttaccaggcaaggtatttgacgctagcatgtgtccaattcagtgtcatttatgattttttgtagtaggatataaatatatacagcgctccaaatagtgcggttgccccaaaaacaccacggaacctcatctgttctcgtactttgttgtgacaaagtagctcactgccttattatcacattttcattatgcaacgcttcggaaaatacgatgttgaaaatgcctctagagatgaaaaacaatcgtaaaagggtcctgcgtaattgaaacatttgatcagtatgcagtggcacagaaacaaccaggaatactatagtcataggcaatacaaggtatatattggctatgcagacccctccagaaagtaccgacgtcaagttagatacacttaacgaacctagtgcacatttaattgagaaaaatgtggctcttcctaaggacatattccgttcgtacttgagttattggatctatgaaatcgctcgctatacaccagtcatgattttgtctaatagacgttcttacaaggtaaaatttcaccgcgtttttaaatagaatgaaaaaaacgttgtagagtgaaagaaaagcaacaaatatacagttcacaaggcagcttcgtatagtaatacagcacgaaaaacagctcatagaaatggtaacacagaccaatccggtccctgttacatatccaacggatgcttatatccccacgtatctgcccgatgataaggtctccaatctggcagatttgaaaaaattgatagaaatggattccagactagatttgtatctgacaagaaggaggctggatacgtccatcaatttacctacaaacaccaagaccaaggaccatccccccaataaagagatgctgaggatttacgtctacaacactacggaaagcagccctcgcagcgattctggcaccccagcggactcaggcaagactacatggacactgagaatagaaggtaagcttctgcacgagtccgc

SEQ ID NO: 148 - DNA, 7114 bp, Artificial Sequence
  PDH
caccggagcttggatatgataaacgaaatattcttgaatcgtgagatcgcctgttttcaaaaccgttggaggcagaaacaattttgtcacaagatgggcattctaccccatccttgctgtattattgtagtctcgctttcttttatgctggacaaatgagactactgcacatttttatacgttcttggttttttttaaaggtgtggtttcggcattatcctgccgcacgtttcttggataattcatcctgattctctattttaaacgcttcagcctatcaggatttggttttgatacatactgcaagagtgtatctcgggaacagtcatttattccgcaacaaacttaattgcggaacgcgttaggcgatttctagcatatatcaaataccgttcgcgatttcttctgggttcgtctcttttcttttaaatacttattaacgtactcaaacaactacacttcgttgtatctcagaatgagatccctcagtatgacaatacatcattctaaacgttcgtaaaacacatatgaaacaactttataacaaagcgaacaaaatgggcaacatgagatgaaactccgcgtcccttagctgaactacccaaacgtacgaatgcctgaacaattagtttagatccgagattccgcgcttccatcatttagtataatccatattttatataatatataggataagtaacagcccgcgaaaaacaacaaataatcataaaaattttagaactagacatatcgagtttatcattatcaatactgccatttcaaagaatacgtaaataattaatagtagtgattttcctaactttatttagtcaaaaaattagccttttaattctgctgtaacccgtacatgcccaaaatagggggcgggttacacagaatatataacatcgtaggtgtctgggtgaacagtttattcctggcatccactaaatataatggagcccgctttttaagctggcatccagaaaaaaaaagaatcccagcaccaaaatattgttttcttcaccaaccatcagttcataggtccattctcttagcgcaactacagagaacaggggcacaaacaggcaaaaaacgggcacaacctcaatggagtgatgcaacctgcctggagtaaatgatgacacaaggcaattgacccacgcatgtatctatctcattttcttacaccttctattaccttctgctctctctgatttggaaaaagctgaaaaaaaaggttgaaaccagttccctgaaattattcccctacttgactaataagtatataaagacggtaggtattgattgtaattctgtaaatctatttcttaaacttcttaaattctacttttatagttagtcttttttttagttttaaaacaccaagaacttagtttcgactagaaaatttattataaaaggaagagaaataattaaacaatgactaagctacactttgacactgctgaaccagtcaagatcacacttccaaatggtttgacatacgagcaaccaaccggtctattcattaacaacaagtttatgaaagctcaagacggtaagacctatcccgtcgaagatccttccactgaaaacaccgtttgtgaggtctcttctgccaccactgaagatgttgaatatgctatcgaatgtgccgaccgtgctttccacgacactgaatgggctacccaagacccaagagaaagaggccgtctactaagtaagttggctgacgaattggaaagccaaattgacttggtttcttccattgaagctttggacaatggtaaaactttggccttagcccgtggggatgttaccattgcaatcaactgtctaagagatgctgctgcctatgccgacaaagtcaacggtagaacaatcaacaccggtgacggctacatgaacttcaccaccttagagccaatcggtgtctgtggtcaaattattccatggaactttccaataatgatgttggcttggaagatcgccccagcattggccatgggtaacgtctgtatcttgaaacccgctgctgtcacacctttaaatgccctatactttgcttctttatgtaagaaggttggtattccagctggtgtcgtcaacatcgttccaggtcctggtagaactgttggtgctgctttgaccaacgacccaagaatcagaaagctggcttttaccggttctacagaagtcggtaagagtgttgctgtcgactcttctgaatctaacttgaagaaaatcactttggaactaggtggtaagtccgcccatttggtctttgacgatgctaacattaagaagactttaccaaatctagtaaacggtattttcaagaacgctggtcaaatttgttcctctggttctagaatttacgttcaagaaggtatttacgacgaactattggctgctttcaaggcttacttggaaaccgaaatcaaagttggtaatccatttgacaaggctaacttccaaggtgctatcactaaccgtcaacaattcgacacaattatgaactacatcgatatcggtaagaaagaaggcgccaagatcttaactggtggcgaaaaagttggtgacaagggttacttcatcagaccaaccgttttctacgatgttaatgaagacatgagaattgttaaggaagaaatttttggaccagttgtcactgtcgcaaagttcaagactttagaagaaggtgtcgaaatggctaacagctctgaattcggtctaggttctatgggtatcgaaacagaatctttgagcacaggtttgaaggtggccaagatgttgaaggccggtaccgtctggatcaacacatacaacgattttgactccagagttccattcggtggtgttaagcaatctggttacggtagagaaatgggtgaagaagtctaccatgcatacactgaagtaaaagctgtcagaattaagttgtaaagacataaaactgaaacaacaccaattaataatagacttttggacttcttcgccagaggtttggtcaagtctccaatcaaggttgtcggcttgtctaccttgccagaaatttacgaaaagatggaaaagggtcaaatcgttggtagatacgttgttgacacttctaaataagcgaatttcttatgatttatgatttttattattaaataagttataaaaaaaataagtgtatacaaattttaaagtgactcttaggttttaaaacgaaaattcttattcttgagtaactctttcctgtaggtcaggttgctttctcaggtatagcatgaggtcgctcttattgaccacacctctaccggcatggcttaaataacatactcatcactaaacattcttaacaatcaaagcaacaggcgcgttggacttttaattttcgaggaccgcgaatccttacatcacacccaatcccccacaagtgatcccccacacaccatagcttcaaaatgtttctactccttttttactcttccagattttctcggactccgcgcatcgccgtaccacttcaaaacacccaagcacagcatactaaatttcccctctttcttcctctagggtgtcgttaattacccgtactaaaggtttggaaaagaaaaaagagaccgcctcgtttctttttcttcgtcgaaaaaggcaataaaaatttttatcacgtttctttttcttgaaaatttttttttttgatttttttctctttcgatgacctcccattgatatttaagttaataaacggtcttcaatttctcaagtttcagtttcatttttcttgttctattacaactttttttacttcttgctcattagaaagaaagcatagcaatctaatctaagttttaatacatctaccagtcaacagccaacaattaactaattaaacaatgtcccaaactcataagcacgctattccagctaatattgctgatagatgcttgatcaacccagaacagtacgaaactaagtacaagcaatccatcaacgatccagatactttttggggtgaacaaggtaagattttggattggattaccccataccaaaaggtcaagaatacttcttttgctccaggcaacgtttccattaagtggtatgaagatggtactttgaacttggctgctaactgtttggatagacacttgcaagaaaacggtgatagaaccgctattatttgggaaggtgatgatacctcccaatccaaacatatctcttacagagaattgcacagagatgtctgtagattcgctaacactttgttggatttgggcatcaaaaagggtgatgttgttgctatctatatgccaatggttcctgaagctgctgttgctatgttggcttgtgctagaattggtgctgttcattctgttattttcggtggtttttcaccagaagctgttgccggtagaattatcgattcttcatccagattggttatcaccgctgatgaaggtgttagagctggtagatctattccattgaaaaagaacgttgatgacgccttgaagaacccaaatgttacttctgttgaacacgtcatcgttttgaagagaactggttctgatatcgattggcaagagggtagagatttgtggtggagagatttgattgaaaaggcttctccagaacatcaaccagaagctatgaacgctgaagatcctttgtttatcttgtacacttctggttctactggtaagccaaaaggtgttttacacactactggtggttatttggtttacgctgctactactttcaagtacgttttcgattatcacccaggtgatatctattggtgtactgctgatgttggttgggttactggtcattcttatttgttgtatggtccattggcttgtggtgctactacattgatgtttgaaggtgttccaaattggccaactccagctagaatgtgtcaagttgttgacaaacaccaagtcaacatcttgtatactgctccaactgctattagagctttgatggctgaaggtgataaggctattgaaggtactgatagatcctccttgagaatcttgggttctgttggtgaacctattaaccctgaagcctgggaatggtattggaagaaaattggtaaagaaaagtgcccagttgttgatacttggtggcaaactgaaactggtggttttatgattactccattgccaggtgctattgaattgaaagctggttctgctactagaccattttttggtgttcaaccagctttggttgataacgaaggtcatccacaagaaggtgctactgaaggtaatttggttattactgattcttggccaggtcaagctagaactttgtttggtgatcacgaaagattcgaacagacttacttctctaccttcaagaacatgtacttctctggtgatggtgctagaagagatgaagatggttactattggattaccggtagagttgatgatgtcttgaatgtttctggtcacagattaggtactgccgaaattgaatctgctttggttgctcatccaaagattgctgaagctgcagttgttggtattccacatgctattaagggtcaagctatctacgcttacgttactttgaatcatggtgaagaaccatctccagaattatacgctgaagttagaaactgggtcagaaaagaaattggtccattagctaccccagatgttttacattggactgattctttgccaaagaccagatcaggtaagatcatgagaagaatcttgagaaagattgctgctggtgatacttctaacttgggtgatacttcaacattagctgatccaggtgttgttgaaaagcctttggaagaaaaacaagctattgccatgccatcctaataattaaatactattttcaaaattctacttaaaaataacagaagacgggagacactagcacacaactttaccaggcaaggtatttgacgctagcatgtgtccaattcagtgtcatttatgattttttgtagtaggatataaatatatacagcgctccaaatagtgcggttgccccaaaaacaccacggaacctcatctgttctcgtactttgttgtgacaaagtagctcactgccttattatcacattttcattatgcaacgcttcggaaaatacgatgttgaaaatgcctctagagatgaaaaacaatcgtaaaagggtcctgcgtaattgaaacatttgatcagtatgcagtggcacagaaacaaccaggaatactatagtcataggcaatacaaggtatatattggctatgcagacccctccagaaagtaccgacgtcaagttagatacacttaacgaacctagtgcacatttaattgagaaaaatgtggctcttcctaaggacatattccgttcgtacttgagttattggatctatgaaatcgctcgctatacaccagtcatgattttgtcattgcgaagactatactgatatatgaatttaaactagagcggaccaactatcatccgctaattactgacattaccaaatgagatctgtgaatgggcaagataaaaaacaaaaattgaaatgtttgacgttatgtaaaactattaattccttcgctttcggcggtcacagaatttgcgtgtagctgactcttgttcaatcaatatcatttgttactttatttgaaagtctgtattactgcgcctattgtcatccgtaccaaagaacgtcaaaaagaaacaagataatttttgtgcttacaccatttatagatcactgagcccagaatatcgctggagctcagtgtaagtggcatgaacacaactctgactgatcgcacatattgccgttatcataaatactagttgtacttgtcaatgcgacgaatggcatcatgcctattattacgttcctctttttccgtttcatgtttccagaatgctattgaatctaacacttcaattataaaaaagaataaatccgcaataattttaggctaattgttgtactgtcaagcgaacctaatggttaaaattcagaggaaccttcgacgtagtctgatcgctacttctatatcttatgttcccagtcaatcaaaagttgatactataatagctgccatttatacctgttagttatggcgatcgtttatcacg

SEQ ID NO: 149 - DNA, 3256 bp, Artificial Sequence
  Maf1
aatgatttaagcgtgcgtgaagataacactacaatccattttaaagcaacatccacattgagtgtatacaccacaaaggttttttcagggcgtttttctcgccactttatgttgaccaaaattattaatggaacttacaacgtttccaaaagttagttaaatacatacgtctatttactaagcaagaaatatatcatgacaagcccaaatattatattgttatgtttacaaaaaaaaaatggctatatacatcaagtctggaggctttttataacaagcaagtggggtaacttagacataagattgacttctttgaattcaacaaaaatacatacttttgatgatttcaatggtagaagcataaacaacaaataatcataaaaattttagaactagacataaagcaacaggcgcgttggacttttaattttcgaggaccgcgaatccttacatcacacccaatcccccacaagtgatcccccacacaccatagcttcaaaatgtttctactccttttttactcttccagattttctcggactccgcgcatcgccgtaccacttcaaaacacccaagcacagcatactaaatttcccctctttcttcctctagggtgtcgttaattacccgtactaaaggtttggaaaagaaaaaagagaccgcctcgtttctttttcttcgtcgaaaaaggcaataaaaatttttatcacgtttctttttcttgaaaatttttttttttgatttttttctctttcgatgacctcccattgatatttaagttaataaacggtcttcaatttctcaagtttcagtttcatttttcttgttctattacaactttttttacttcttgctcattagaaagaaagcatagcaatctaatctaagttttaatctagaaaatttattataaaaggaagagaaataattaaacaatgaaatttattgatgagctagatatagagagagtgaatcaaactctcaatttcgagacaaatgactgtaaaatcgtgggcagttgcgatattttcacaacaaaggcggttgcatcagatagaaaattatataaaactattgatcagcatttggatactattttacaggaaaatgagaattacaatgctacccttcagcaacagctagctgctcccgaaacaaaccaatcaccctgctcgtcgccattttattctaataggagggatagcaactctttttgggagcaaaagagaagaatatcttttagtgaatacaatagcaataataacactaacaacagtaatggcaatagcagtaataacaataactattctggacctaatggttcttctccagcaacttttcccaaaagtgccaagctaaatgaccaaaatttaaaagaattagtctcgaattacgattctggctctatgagctcatcgtctcttgattcttcttctaagaatgatgagaggataagaagaaggagcagtagcagtattagcagtttcaaaagtggtaaatcatcgaacaataattacagttctggtacagcaaccaacaatgttaacaaaagaagaaaatcttcgataaacgaaaggccaagcaatttaagtttgggtccgtttggtcccataaacgaaccgtcaagccgcaaaatatttgcttatctgattgctatcctcaacgcttcttatcctgaccatgatttttcatcggttgagccaacggattttgtcaaaacatcattgaaaacttttatttccaaatttgaaaacaccttatattctcttggtagacaaccagaggaatgggtctgggaggtaattaattctcacatgactctttctgattgcgtcctttttcaatattcaccttcaaactcttttttggaagatgagcctggctatctttggaatcttataggttttctttacaacaggaaaaggaaaagagtggcttacctttacttgatttgctcgcgtctaaattcgagtacaggcgaagtggaagatgccttggcaaaaaaacctcagggaaagcttataatagatgatggctcaaatgaatacgaaggagaatacgatttcacttatgatgagaatgtaatagatgataaatcagatcaagaagaatccctacagtagagacataaaactgaaacaacaccaattaataatagactttacagaagacgggagacactagcacacaactttaccaggcaaggtatttgacgctagcatgtgtccaattcagtgtcatttatgattttttgtagtaggatataaatatatacagcgctccaaatagtgcggttgccccaaaaacaccacggaacctcatctgttctcgtactttgttgtgacaaagtagctcactgccttattatcacattttcattatgcaacgcttcggaaaatacgatgttgaaaatgcctctagagatgaaaaacaatcgtaaaagggtcctgcgtaattgaaacatttgatcagtatgcagtggcacagaaacaaccaggaatactatagtcataggcaatacaaggtatatattggctatgcagacccctccagaaagtaccgacgtcaagttagatacacttaacgaacctagtgcacatttaattgagaaaaatgtggctcttcctaaggacatattccgttcgtacttgagttattggatctatgaaatcgctcgctatacaccagtcatgattttgtccttaaataacatactcatcactaaacattcttaacaatcagaaaacaacgcgtcatgaaaaagagttactgaaccttcagatcctacttattgtaatgcttcgcgacatccaatccatttaataatcaatttaaaactagagttggtagagttccttgttgaacgtgataacccaaaagcataatacgagtaatgtttcagtattgctattatatgtttacacaaggaaaacatataataacaaacctctaatccggtagtacttaagaaactatagtttctatgtacaaaaaggtaactatgtaattcttacatttacataacatatagaagggtccaataaacttactaaacttactaccttgttgtatataggctagatcgtaatccactacgtcaacataaaaaaaacttaaggagtttgaattttatgtacaaacagattgttaaaatataatataagattatggaaacgaacttgctctaaaaaaaatttaaagttttataaaatcctcgcactatcgctgttatacatgatgtccccaaagcgtgtac

SEQ ID NO: 150 - DNA, 4538 bp, Artificial Sequence
  Erg20K197E
ggccgcgttgctggcgtttttccataggctccgcccccctgacgagcatcacaaaaatcgacgctcaagtcagaggtggcgaaacccgacaggactataaagataccaggcgtttccccctggaagctccctcgtgcgctctcctgttccgaccctgccgcttaccggatacctgtccgcctttctcccttcgggaagcgtggcgctttctcaatgctcacgctgtaggtatctcagttcggtgtaggtcgttcgctccaagctgggctgtgtgcacgaaccccccgttcagcccgaccgctgcgccttatccggtaactatcgtcttgagtccaacccggtaagacacgacttatcgccactggcagcagccactggtaacaggattagcagagcgaggtatgtaggcggtgctacagagttcttgaagtggtggcctaactacggctacactagaaggacagtatttggtatctgcgctctgctgaagccagttaccttcggaaaaagagttggtagctcttgatccggcaaacaaaccaccgctggtagcggtggtttttttgtttgcaagcagcagattacgcgcagaaaaaaaggatctcaagaagatcctttgatcttttctacggggtctgacgctcagtggaacgaaaactcacgttaagggattttggtcatgaacgcatctacgactgtgggtcccgtggagaaatgtatgaaaccctgtatggagagtgattagcttgcctcgtccccgccgggtcacccggccagcgacatggaggcccagaataccctccttgacagtcttgacgtgcgcagctcaggggcatgatgtgactgtcgcccgtacatttagcccatacatccccatgtataatcatttgcatccatacattttgatggccgcacggcgcgaagcaaaaattacggctcctcgctgcagacctgcgagcagggaaacgctcccctcacagacgcgttgaattgtccccacgccgcgcccctgtagagaaatataaaaggttaggatttgccactgaggttcttctttcatatacttccttttaaaatcttgctaggatacagttctcacatcacatccgaacataaacaaccatgggtaaggaaaagactcacgtttcgaggccgcgattaaattccaacatggatgctgatttatatgggtataaatgggctcgcgataatgtcgggcaatcaggtgcgacaatctatcgattgtatgggaagcccgatgcgccagagttgtttctgaaacatggcaaaggtagcgttgccaatgatgttacagatgagatggtcagactaaactggctgacggaatttatgcctcttccgaccatcaagcattttatccgtactcctgatgatgcatggttactcaccactgcgatccccggcaaaacagcattccaggtattagaagaatatcctgattcaggtgaaaatattgttgatgcgctggcagtgttcctgcgccggttgcattcgattcctgtttgtaattgtccttttaacagcgatcgcgtatttcgtctcgctcaggcgcaatcacgaatgaataacggtttggttgatgcgagtgattttgatgacgagcgtaatggctggcctgttgaacaagtctggaaagaaatgcataagcttttgccattctcaccggattcagtcgtcactcatggtgatttctcacttgataaccttatttttgacgaggggaaattaataggttgtattgatgttggacgagtcggaatcgcagaccgataccaggatcttgccatcctatggaactgcctcggtgagttttctccttcattacagaaacggctttttcaaaaatatggtattgataatcctgatatgaataaattgcagtttcatttgatgctcgatgagtttttctaatcagtactgacaataaaaagattcttgttttcaagaacttgtcatttgtatagtttttttatattgtagttgttctattttaatcaaatgttagcgtgatttatattttttttcgcctcgacatcatctgcccagatgcgaagttaagtgcgcagaaagtaatatcatgcgtcaatcgtatgtgaatgctggtcgctatactgctgtcgattcgatactaacgccgccatccagtgtcgaaaacgagctctcgagaacccttaatcatacgttgaaactacggcaaaggattggtcagatcgcttcatacaggggtatcccggcataaccctcactaaagggaacaaaagctggagctcgtttaaaagcaacaggcgcgttggacttttaattttcgaggaccgcgaatccttacatcacacccaatcccccacaagtgatcccccacacaccatagcttcaaaatgtttctactccttttttactcttccagattttctcggactccgcgcatcgccgtaccacttcaaaacacccaagcacagcatactaaatttcccctctttcttcctctagggtgtcgttaattacccgtactaaaggtttggaaaagaaaaaagagaccgcctcgtttctttttcttcgtcgaaaaaggcaataaaaatttttatcacgtttctttttcttgaaaatttttttttttgatttttttctctttcgatgacctcccattgatatttaagttaataaacggtcttcaatttctcaagtttcagtttcatttttcttgttctattacaactttttttacttcttgctcattagaaagaaagcatagcaatctaatctaagttttaatggcgggggtcggaatgattaaagaaaggggctgtgggcgagattgaaacaatggcttcagaaaaagaaattaggagagagagattcttgaacgttttccctaaattagtagaggaattgaacgcatcgcttttggcttacggtatgcctaaggaagcatgtgactggtatgcccactcattgaactacaacactccaggcggtaagctaaatagaggtttgtccgttgtggacacgtatgctattctctccaacaagaccgttgaacaattggggcaagaagaatacgaaaaggttgccattctaggttggtgcattgagttgttgcaggcttacttcttggtcgccgatgatatgatggacaagtccattaccagaagaggccaaccatgttggtacaaggttcctgaagttggggaaattgccatcaatgacgcattcatgttagaggctgctatctacaagcttttgaaatctcacttcagaaacgaaaaatactacatagatatcaccgaattgttccatgaggtcaccttccaaaccgaattgggccaattgatggacttaatcactgcacctgaagacaaagtcgacttgagtaagttctccctaaagaagcactccttcatagttactttcgagactgcttactattctttctacttgcctgtcgcattggccatgtacgttgccggtatcacggatgaaaaggatttgaaacaagccagagatgtcttgattccattgggtgaatacttccaaattcaagatgactacttagactgcttcggtaccccagaacagatcggtaagatcggtacagatatccaagataacaaatgttcttgggtaatcaacaaggcattggaacttgcttccgcagaacaaagaaagactttagacgaaaattacggtaagaaggactcagtcgcagaagccaaatgcaaaaagattttcaatgacttgaaaattgaacagctataccacgaatatgaagagtctattgccaaggatttgaaggccaaaatttctcaggtcgatgagtctcgtggcttcaaagctgatgtcttaactgcgttcttgaacaaagtttacaagagaagcaaataaccagttaataaaccgtggcaaacatgatggtggcctaatggaggtcaccaacagaagacgggagacactagcacacaactttaccaggcaaggtatttgacgctagcatgtgtccaattcagtgtcatttatgattttttgtagtaggatataaatatatacagcgctccaaatagtgcggttgccccaaaaacaccacggaacctcatctgttctcgtactttgttgtgacaaagtagctcactgccttattatcacattttcattatgcaacgcttcggaaaatacgatgttgaaaatgcctctagagatgaaaaacaatcgtaaaagggtcctgcgtaattgaaacatttgatcagtatgcagtggcacagaaacaaccaggaatactatagtcataggcaatacaaggtatatattggctatgcagacccctccagaaagtaccgacgtcaagttagatacacttaacgaacctagtgcacatttaattgagaaaaatgtggctcttcctaaggacatattccgttcgtacttgagttattggatctatgaaatcgctcgctatacaccagtcatgattttgtcgcggccgcggtacctaataacttcgtatagcatacattatacgaagttat

SEQ ID NO: 151 - DNA, 3503 bp, Artificial Sequence
  Erg1p:UB14-Erg20:deg
tgtgcacaaaggccataatattatgtctacagaatatactagatgtcctccctataggatatagtaatcctctaaatggaaccgatatttctacataataatattacgattattcctccttccgttttatatgtttcattatcctagcacactatcaatctttgcatttcagcttccattagatttgatgactatttctcaatctttatgttatctccttacgccgcatgtgataatatactgctagtatgactactagttgatagaagatagttgatttttactccaacaaaagtaacaatattatttagaactatagattccattttgtgcattcccatattctcgaggaaaacttttagtatattctgtagacataatattatcgcctttgtgaacaatagaatcccaacaattgtcgcaaatttaccaattttctagattgcagtcaccttttcaattaatcactagtgtttcacttgtaacattgtcgttgttgtttaacgtattctgtcccgtgccaactatgacaaaaatgcaatgatttcagcggttaaatacgaagcgcaacaagagttagcgaaaaataagtaccaccattctacgctaccattacttactgaaattagagacaactgttatctattggcagatgttcatacggggctttcaaatattgatgaaattatgtgatgtttagaagaagattcgaactgttttcagtagatttggtaactgtgcaaccataactcatgcctacgttcgggatttaatcttctcgcagtctgcaggcgccttgagatttgcgttcggcctaaacgtttgctccacaaacgtgaatggtatgaacatggacatgagcgtggttcagggcactctacgggatcgtggcgaatgggaatcgttctgcaagctcttctaccaaaccatcggcgaatttgcgtcgctttaatgcgatactgccgtagcgggccttcgtatagctcggccgagctcgtacaaaaggcaagcagtgtatcggacagagctgatataacacaatacgctcgtagtcgatgcatgccgtggctgctctcggtcgggtataagtcttagacaatagtcttacctcgcatgtataataaatcttttgtatttaatctattatatgtttctatgcttttttttcctattgttgtttgcttttccttttccttatttctttctagcttctaattttctttcttttttttttttttttcattgaaaattatatatatatatatatatcagaacaattgtccagtattgaacaatacaggttatttcgaacaattgaaaaaaaaaaatcacagaaaaacatatcgagaaaagggtcaaaacaatgcagattttcgtcaagactttgaccggtaaaaccataacattggaagttgaatcttccgataccatcgacaacgttaagtcgaaaattcaagacaaggaaggtatccctccagatcaacaaagattgatctttgccggtaagcagctagaagacggtagaacgctgtctgattacaacattcagaaggagtccaccttacatcttgtgctaaggctaagaggtggtttccacaaatctggtgcttggttgttgccagtttctttggttaagggttctggtgcttcagaaaaagaaattaggagagagagattcttgaacgttttccctaaattagtagaggaattgaacgcatcgcttttggcttacggtatgcctaaggaagcatgtgactggtatgcccactcattgaactacaacactccaggcggtaagctaaatagaggtttgtccgttgtggacacgtatgctattctctccaacaagaccgttgaacaattggggcaagaagaatacgaaaaggttgccattctaggttggtgcattgagttgttgcaggcttacttcttggtcgccgatgatatgatggacaagtccattaccagaagaggccaaccatgttggtacaaggttcctgaagttggggaaattgccatcaatgacgcattcatgttagaggctgctatctacaagcttttgaaatctcacttcagaaacgaaaaatactacatagatatcaccgaattgttccatgaggtcaccttccaaaccgaattgggccaattgatggacttaatcactgcacctgaagacaaagtcgacttgagtaagttctccctaaagaagcactccttcatagttactttcaagactgcttactattctttctacttgcctgtcgcattggccatgtacgttgccggtatcacggatgaaaaggatttgaaacaagccagagatgtcttgattccattgggtgaatacttccaaattcaagatgactacttagactgcttcggtaccccagaacagatcggtaagatcggtacagatatccaagataacaaatgttcttgggtaatcaacaaggcattggaacttgcttccgcagaacaaagaaagactttagacgaaaattacggtaagaaggactcagtcgcagaagccaaatgcaaaaagattttcaatgacttgaaaattgaacagctataccacgaatatgaagagtctattgccaaggatttgaaggccaaaatttctcaggtcgatgagtctcgtggcttcaaagctgatgtcttaactgcgttcttgaacaaagtttacaagagaagcaaatagtggacttcttcgccagaggtttggtcaagtctccaatcaaggttgtcggcttgtctaccttgccagaaatttacgaaaagatggaaaagggtcaaatcgttggtagatacgttgttgacacttctaaataagcgaatttcttatgatttatgatttttattattaaataagttataaaaaaaataagtgtatacaaattttaaagtgactcttaggttttaaaacgaaaattcttattcttgagtaactctttcctgtaggtcaggttgctttctcaggtatagcatgaggtcgctcttattgaccacacctctaccggcatggaatcgtccccaacaaaagtgggctctcaaaattcatcacatttaaatgcatataggaagagcaacagttggtttgcatctgatgttccttaaagatttcgacataatgtgcgaagtagataaaatgggtcatttattaatagttatttcattattaaccagttgtggtacaaatgcaactaaagaaaaaaactactaaactatccgggaaatgcgccttagattgcacttcttaattcttattttcgatttttatttttcctttgataatcataaagagaaacgacgatcatttctaaagccatttctgctagtataccgttaaataagaaaaataaagccaaatattataatttttctaatgtgaatccataaatatcaaagcatgcaaaaagggaaagaagtaatgtcttggatttatatagcgtatttgtctaaggggagccagctttggcgcgcctatcgagagaccgattaca

SEQ ID NO: 152 - DNA, 4859 bp, Artificial Sequence
  tHMGr-IDI
ggcgcgcccgagatctttgtgttcggttacccggctcagatcctaacttcgtatgtttattcgtataagttactgttgtccacaggcaatactctgcagaaaattaaaacggcattaatgctaggacaaccagaattgttactactgtatgtgcgatagttgataactgcaacattatgcccggtatattctcaaaaaaccctattactgcatacgaagaaatcgctcgagtttatcattatcaatactgccatttcaaagaatacgtaaataattaatagtagtgattttcctaactttatttagtcaaaaaattagccttttaattctgctgtaacccgtacatgcccaaaatagggggcgggttacacagaatatataacatcgtaggtgtctgggtgaacagtttattcctggcatccactaaatataatggagcccgctttttaagctggcatccagaaaaaaaaagaatcccagcaccaaaatattgttttcttcaccaaccatcagttcataggtccattctcttagcgcaactacagagaacaggggcacaaacaggcaaaaaacgggcacaacctcaatggagtgatgcaacctgcctggagtaaatgatgacacaaggcaattgacccacgcatgtatctatctcattttcttacaccttctattaccttctgctctctctgatttggaaaaagctgaaaaaaaaggttgaaaccagttccctgaaattattcccctacttgactaataagtatataaagacggtaggtattgattgtaattctgtaaatctatttcttaaacttcttaaattctacttttatagttagtcttttttttagttttaaaacaccaagaacttagtttcgaaaacaatggttttaaccaataaaacagtcatttctggatcgaaagtcaaaagtttatcatctgcgcaatcgagctcatcaggaccttcatcatctagtgaggaagatgattcccgcgatattgaaagcttggataagaaaatacgtcctttagaagaattagaagcattattaagtagtggaaatacaaaacaattgaagaacaaagaggtcgctgccttggttattcacggtaagttacctttgtacgctttggagaaaaaattaggtgatactacgagagcggttgcggtacgtaggaaggctctttcaattttggcagaagctcctgtattagcatctgatcgtttaccatataaaaattatgactacgaccgcgtatttggcgcttgttgtgaaaatgttataggttacatgcctttgcccgttggtgttataggccccttggttatcgatggtacatcttatcatataccaatggcaactacagagggttgtttggtagcttctgccatgcgtggctgtaaggcaatcaatgctggcggtggtgcaacaactgttttaactaaggatggtatgacaagaggcccagtagtccgtttcccaactttgaaaagatctggtgcctgtaagatatggttagactcagaagagggacaaaacgcaattaaaaaagcttttaactctacatcaagatttgcacgtctgcaacatattcaaacttgtctagcaggagatttactcttcatgagatttagaacaactactggtgacgcaatgggtatgaatatgatttctaaaggtgtcgaatactcattaaagcaaatggtagaagagtatggctgggaagatatggaggttgtctccgtttctggtaactactgtaccgacaaaaaaccagctgccatcaactggatcgaaggtcgtggtaagagtgtcgtcgcagaagctactattcctggtgatgttgtcagaaaagtgttaaaaagtgatgtttccgcattggttgagttgaacattgctaagaatttggttggatctgcaatggctgggtctgttggtggatttaacgcacatgcagctaatttagtgacagctgttttcttggcattaggacaagatcctgcacaaaatgttgaaagttccaactgtataacattgatgaaagaagtggacggtgatttgagaatttccgtatccatgccatccatcgaagtaggtaccatcggtggtggtactgttctagaaccacaaggtgccatgttggacttattaggtgtaagaggcccgcatgctaccgctcctggtaccaacgcacgtcaattagcaagaatagttgcctgtgccgtcttggcaggtgaattatccttatgtgctgccctagcagccggccatttggttcaaagtcatatgacccacaacaggaaacctgctgaaccaacaaaacctaacaatttggacgccactgatataaatcgtttgaaagatgggtccgtcacctgcattaaatcctaatggacttcttcgccagaggtttggtcaagtctccaatcaaggttgtcggcttgtctaccttgccagaaatttacgaaaagatggaaaagggtcaaatcgttggtagatacgttgttgacacttctaaataagcgaatttcttatgatttatgatttttattattaaataagttataaaaaaaataagtgtatacaaattttaaagtgactcttaggttttaaaacgaaaattcttattcttgagtaactctttcctgtaggtcaggttgctttctcaggtatagcatgaggtcgctcttattgaccacacctctaccggcatgcaagcaacaggcgcgttggacttttaattttcgaggaccgcgaatccttacatcacacccaatcccccacaagtgatcccccacacaccatagcttcaaaatgtttctactccttttttactcttccagattttctcggactccgcgcatcgccgtaccacttcaaaacacccaagcacagcatactaaatttcccctctttcttcctctagggtgtcgttaattacccgtactaaaggtttggaaaagaaaaaagagaccgcctcgtttctttttcttcgtcgaaaaaggcaataaaaatttttatcacgtttctttttcttgaaaatttttttttttgatttttttctctttcgatgacctcccattgatatttaagttaataaacggtcttcaatttctcaagtttcagtttcatttttcttgttctattacaactttttttacttcttgctcattagaaagaaagcatagcaatctaatctaagttttaataaacaatgactgccgacaacaatagtatgccccatggtgcagtatctagttacgccaaattagtgcaaaaccaaacacctgaagacattttggaagagtttcctgaaattattccattacaacaaagacctaatacccgatctagtgagacgtcaaatgacgaaagcggagaaacatgtttttctggtcatgatgaggagcaaattaagttaatgaatgaaaattgtattgttttggattgggacgataatgctattggtgccggtaccaagaaagtttgtcatttaatggaaaatattgaaaagggtttactacatcgtgcattctccgtctttattttcaatgaacaaggtgaattacttttacaacaaagagccactgaaaaaataactttccctgatctttggactaacacatgctgctctcatccactatgtattgatgacgaattaggtttgaagggtaagctagacgataagattaagggcgctattactgcggcggtgagaaaactagatcatgaattaggtattccagaagatgaaactaagacaaggggtaagtttcactttttaaacagaatccattacatggcaccaagcaatgaaccatggggtgaacatgaaattgattacatcctattttataagatcaacgctaaagaaaacttgactgtcaacccaaacgtcaatgaagttagagacttcaaatgggtttcaccaaatgatttgaaaactatgtttgctgacccaagttacaagtttacgccttggtttaagattatttgcgagaattacttattcaactggtgggagcaattagatgacctttctgaagtggaaaatgacaggcaaattcatagaatgctataaacagaagacgggagacactagcacacaactttaccaggcaaggtatttgacgctagcatgtgtccaattcagtgtcatttatgattttttgtagtaggatataaatatatacagcgctccaaatagtgcggttgccccaaaaacaccacggaacctcatctgttctcgtactttgttgtgacaaagtagctcactgccttattatcacattttcattatgcaacgcttcggaaaatacgatgttgaaaatgcctctagagatgaaaaacaatcgtaaaagggtcctgcgtaattgaaacatttgatcagtatgcagtggcacagaaacaaccaggaatactatagtcataggcaatacaaggtatatattggctatgcagacccctccagaaagtaccgacgtcaagttagatacacttaacgaacctagtgcacatttaattgagaaaaatgtggctcttcctaaggacatattccgttcgtacttgagttattggatctatgaaatcgctcgctatacaccagtcatgattttgtcacactcgtatatgcatgttgttgaaactctgttacgctgaactaacaatcacacatgtagaggtcaccgggaaaagttgcgaccccatggaaggtcgatctcttcgtttggctttgcttggctggcggcattgcgcttcttcgcttatacccgtctcttgacgctcgagctcgttcattgagatacctttattcttgcacattttctggcttttttcgctactcgggtacggcgcgcc

SEQ ID NO: 153 - DNA, 7673 bp, Artificial Sequence
  PGK1p:ACC1S659A,S1157A
caagtcgcagtcgaaattcaaccgctcattgccactctctctactgcttggtgaactaggctatacgctcaatcagcgccaagatatataagaagaacagcactcccagtcgtattctggcacagtatagcctagcacaatcactgtcacaattgttatcggttctacaattgttctgctctcttcaattttcctttccttattctactctttttatccctacgcacagatattataacatctgcataataggcatttgcaagaattactcgtgagtaaggaaagagtgaggaactatcgcatacctgcatttaaagatgccgatttgggcgcgaatcctttattttggcttcaccctcatactattatcagggccagaaaaaggaagtgtttccctccttcttgaattgatgttaccctcataaagcacgtggcctcttatcgagaaagaaattaccgtcgctcgtgatttgtttgcaaaaagaacaaaactgaaaaaacccagacacgctcgacttcctgtcttcctattgattgcagcttccaatttcgtcacacaacaaggtcctagcgacggctcacaggttttgtaacaagcaatcgaaggttctggaatggcgggaaagggtttagtaccacatgctatgatgcccactgtgatctccagagcaaagttcgttcgatcgtactgttactctctctctttcaaacagaattgtccgaatcgtgtgacaacaacagcctgttctcacacactcttttcttctaaccaagggggtggtttagtttagtagaacctcgtgaaacttacatttacatatatataaacttgcataaattggtcaatgcaagaaatacatatttggtcttttctaattcgtagtttttcaagttcttagatgctttctttttctcttttttacagatcatcaaggaagtaattatctactttttacaacaaatataaaacaatgagcgaagaaagcttattcgagtcttctccacagaagatggagtacgaaattacaaactactcagaaagacatacagaacttccaggtcatttcattggcctcaatacagtagataaactagaggagtccccgttaagggactttgttaagagtcacggtggtcacacggtcatatccaagatcctgatagcaaataatggtattgccgccgtgaaagaaattagatccgtcagaaaatgggcatacgagacgttcggcgatgacagaaccgtccaattcgtcgccatggccaccccagaagatctggaggccaacgcagaatatatccgtatggccgatcaatacattgaagtgccaggtggtactaataataacaactacgctaacgtagacttgatcgtagacatcgccgaaagagcagacgtagacgccgtatgggctggctggggtcacgcctccgagaatccactattgcctgaaaaattgtcccagtctaagaggaaagtcatctttattgggcctccaggtaacgccatgaggtctttaggtgataaaatctcctctaccattgtcgctcaaagtgctaaagtcccatgtattccatggtctggtaccggtgttgacaccgttcacgtggacgagaaaaccggtctggtctctgtcgacgatgacatctatcaaaagggttgttgtacctctcctgaagatggtttacaaaaggccaagcgtattggttttcctgtcatgattaaggcatccgaaggtggtggtggtaaaggtatcagacaagttgaacgtgaagaagatttcatcgctttataccaccaggcagccaacgaaattccaggctcccccattttcatcatgaagttggccggtagagcgcgtcacttggaagttcaactgctagcagatcagtacggtacaaatatttccttgttcggtagagactgttccgttcagagacgtcatcaaaaaattatcgaagaagcaccagttacaattgccaaggctgaaacatttcacgagatggaaaaggctgccgtcagactggggaaactagtcggttatgtctctgccggtaccgtggagtatctatattctcatgatgatggaaaattctactttttagaattgaacccaagattacaagtcgagcatccaacaacggaaatggtctccggtgttaacttacctgcagctcaattacaaatcgctatgggtatccctatgcatagaataagtgacattagaactttatatggtatgaatcctcattctgcctcagaaatcgatttcgaattcaaaactcaagatgccaccaagaaacaaagaagacctattccaaagggtcattgtaccgcttgtcgtatcacatcagaagatccaaacgatggattcaagccatcgggtggtactttgcatgaactaaacttccgttcttcctctaatgtttggggttacttctccgtgggtaacaatggtaatattcactccttttcggactctcagttcggccatatttttgcttttggtgaaaatagacaagcttccaggaaacacatggttgttgccctgaaggaattgtccattaggggtgatttcagaactactgtggaatacttgatcaaacttttggaaactgaagatttcgaggataacactattaccaccggttggttggacgatttgattactcataaaatgaccgctgaaaagcctgatccaactcttgccgtcatttgcggtgccgctacaaaggctttcttagcatctgaagaagcccgccacaagtatatcgaatccttacaaaagggacaagttctatctaaagacctactgcaaactatgttccctgtagattttatccatgagggtaaaagatacaagttcaccgtagctaaatccggtaatgaccgttacacattatttatcaatggttctaaatgtgatatcatactgcgtcaactatctgatggtggtcttttgattgccataggcggtaaatcgcataccatctattggaaagaagaagttgctgctacaagattatccgttgactctatgactactttgttggaagttgaaaacgatccaacccagttgcgtactccatcccctggtaaattggttaaattcttggtggaaaatggtgaacacattatcaagggccaaccatatgcagaaattgaagttatgaaaatgcaaatgcctttggtttctcaagaaaatggtatcgtccagttattaaagcaacctggttctaccattgttgcaggtgatatcatggctattatgactcttgacgatccatccaaggtcaagcacgctctaccatttgaaggtatgctgccagattttggttctccagttatcgaaggaaccaaacctgcctataaattcaagtcattagtgtctactttggaaaacattttgaagggttatgacaaccaagttattatgaacgcttccttgcaacaattgatagaggttttgagaaatccaaaactgccttactcagaatggaaactacacatctctgctttacattcaagattgcctgctaagctagatgaacaaatggaagagttagttgcacgttctttgagacgtggtgctgttttcccagctagacaattaagtaaattgattgatatggccgtgaagaatcctgaatacaaccccgacaaattgctgggcgccgtcgtggaaccattggcggatattgctcataagtactctaacgggttagaagcccatgaacattctatatttgtccatttcttggaagaatattacgaagttgaaaagttattcaatggtccaaatgttcgtgaggaaaatatcattctgaaattgcgtgatgaaaaccctaaagatctagataaagttgcgctaactgttttgtctcattcgaaagtttcagcgaagaataacctgatcctagctatcttgaaacattatcaaccattgtgcaagttatcttctaaagtttctgccattttctctactcctctacaacatattgttgaactagaatctaaggctaccgctaaggtcgctctacaagcaagagaaattttgattcaaggcgctttaccttcggtcaaggaaagaactgaacaaattgaacatatcttaaaatcctctgttgtgaaggttgcctatggctcatccaatccaaagcgctctgaaccagatttgaatatcttgaaggacttgatcgattctaattacgttgtgttcgatgttttacttcaattcctaacccatcaagacccagttgtgactgctgcagctgctcaagtctatattcgtcgtgcttatcgtgcttacaccataggagatattagagttcacgaaggtgtcacagttccaattgttgaatggaaattccaactaccttcagctgcgttctccacctttccaactgttaaatctaaaatgggtatgaacagggctgtttctgtttcagatttgtcatatgttgcaaacagtcagtcatctccgttaagagaaggtattttgatggctgtggatcatttagatgatgttgatgaaattttgtcacaaagtttggaagttattcctcgtcaccaatcttcttctaacggacctgctcctgatcgttctggtagctccgcatcgttgagtaatgttgctaatgtttgtgttgcttctacagaaggtttcgaatctgaagaggaaattttggtaaggttgagagaaattttggatttgaataagcaggaattaatcaatgcttctatccgtcgtatcacatttatgttcggttttaaagatgggtcttatccaaagtattatacttttaacggtccaaattataacgaaaatgaaacaattcgtcacattgagccggctttggccttccaactggaattaggaagattgtccaacttcaacattaaaccaattttcactgataatagaaacatccatgtctacgaagctgttagtaagacttctccattggataagagattctttacaagaggtattattagaacgggtcatatccgtgatgacatttctattcaagaatatctgacttctgaagctaacagattgatgagtgatatattggataatttagaagtcaccgacacttcaaattctgatttgaatcatatcttcatcaacttcattgcggtgtttgatatctctccagaagatgtcgaagccgccttcggtggtttcttagaaagatttggtaagagattgttgagattgcgtgtttcttctgccgaaattagaatcatcatcaaagatcctcaaacaggtgccccagtaccattgcgtgccttgatcaataacgtttctggttatgttatcaaaacagaaatgtacaccgaagtcaagaacgcaaaaggtgaatgggtatttaagtctttgggtaaacctggatccatgcatttaagacctattgctactccttaccctgttaaggaatggttgcaaccaaaacgttataaggcacacttgatgggtaccacatatgtctatgacttcccagaattattccgccaagcatcgtcatcccaatggaaaaatttctctgcagatgttaagttaacagatgatttctttatttccaacgagttgattgaagatgaaaacggcgaattaactgaggtggaaagagaacctggtgccaacgctattggtatggttgcctttaagattactgtaaagactcctgaatatccaagaggccgtcaatttgttgttgttgctaacgatatcacattcaagatcggttcctttggtccacaagaagacgaattcttcaataaggttactgaatatgctagaaagcgtggtatcccaagaatttacttggctgcaaactcaggtgccagaattggtatggctgaagagattgttccactatttcaagttgcatggaatgatgctgccaatccggacaagggcttccaatacttatacttaacaagtgaaggtatggaaactttaaagaaatttgacaaagaaaattctgttctcactgaacgtactgttataaacggtgaagaaagatttgtcatcaagacaattattggttctgaagatgggttaggtgtcgaatgtctacgtggatctggtttaattgctggtgcaacgtcaagggcttaccacgatatcttcactatcaccttagtcacttgtagatccgtcggtatcggtgcttatttggttcgtttgggtcaaagagctattcaggtcgaaggccagccaattattttaactggtgctcctgcaatcaacaaaatgctgggtagagaagtttatacttctaacttacaattgggtggtactcaaatcatgtataacaacggtgtttcacatttgactgctgttgacgatttagctggtgtagagaagattgttgaatggatgtcttatgttccagccaagcgtaatatgccagttcctatcttggaaactaaagacacatgggatagaccagttgatttcactccaactaatgatgaaacttacgatgtaagatggatgattgaaggtcgtgagactgaaagtggatttgaatatggtttgtttgataaagggtctttctttgaaactttgtcaggatgggccaaaggtgttgtcgttggtagagcccgtcttggtggtattccactgggtgttattggtgttgaaacaagaactgtcgagaacttgattcctgctgatccagctaatccaaatagtgctgaaacattaattcaagaacctggtcaagtttggcatccaaactccgccttcaagactgctcaagctatcaatgactttaacaacggtgaacaattgccaatgatgattttggccaactggagaggtttctctggtggtcaacgtgatatgttcaacgaagtcttgaagtatggttcgtttattgttgacgcattggtggattacaaacaaccaattattatctatatcccacctaccggtgaactaagaggtggttcatgggttgttgtcgatccaactatcaacgctgaccaaatggaaatgtatgccgacgtcaacgctagagctggtgttttggaaccacaaggtatggttggtatcaagttccgtagagaaaaattgctggacaccatgaacagattggatgacaagtacagagaattgagatctcaattatccaacaagagtttggctccagaagtacatcagcaaatatccaagcaattagctgatcgtgagagagaactattgccaatttacggacaaatcagtcttcaatttgctgatttgcacgataggtcttcacgtatggtggccaagggtgttatttctaaggaactggaatggaccgaggcacgtcgtttcttcttctggagattgagaagaagattgaacgaagaatatttgattaaaaggttgagccatcaggtaggcgaagcatcaagattagaaaagatcgcaagaattagatcgtggtaccctgcttcagtggaccatgaagatgataggcaagtcgcaacatggattgaagaaaactacaaaactttggacgataaactaaagggtttgaaattagagtcattcgctcaagacttagctaaaaagatcagaagcgaccatgacaatgctattgatggattatctgaagttatcaagatgttatctaccgatgataaagaaaaattgttgaagactttgaaataa

SEQ ID NO: 154 - DNA, 2177 bp, Artificial Sequence
  OAC
ttagtagatgatagttgatttttattccaacattattgtactcagcaattgttgcgaaacagacaagattaagtatattattcaaggccttgcttacctagatgaaccattgagaaatatacatattgagcaatacctctaggtccgaagttccgtgcctacaccctttagtcagatttagattatatgagataagtggtattttgtggaccaagtttgtgattaatctgatatcaagttactttcttaacgacattaggacgccagggtagccagtattattcaagtccatagaacagcctgtataccttcacttcattaggtatattcttggttatgcgttatttaaatcctcatctgccgctgcttaaaaaaagcagctaaagtgttgcgtaggcacggattagaagccgccgagcgggtgacagccctccgaaggaagactctcctccgtgcgtcctcgtcttcaccggtcgcgttcctgaaacgcagatgtgcctcgcgccgcactgctccgaacaataaagattctacaatactagcttttatggttatgaagaggaaaaattggcagtaacctggccccacaaaccttcaaatgaacgaatcaaattaacaaccataggatgataatgcgattagttttttagccttatttctggggtaattaatcagcgaagcgatgatttttgatctattaacagatatataaatgcaaaaactgcataaccactttaactaatactttcaacattttcggtttgtattacttcttattcaaatgtaataaaagtatcaacaaaaaattgttaatatacctctatactttaacgtcaaggagatggccgtcaagcacttgatcgtcttaaagtttaaggacgagatcactgaagcccaaaaggaagaattcttcaaaacttacgttaacttggttaacatcattcctgctatgaaggacgtctactggggtaaggatgtcactcaaaaaaacaaggaagaaggttatacccacatcgttgaagtcaccttcgaatctgttgaaactattcaagactacatcattcacccagctcacgtcggtttcggtgatgtttacagatctttctgggaaaaattgttgatcttcgactacaccccaagaaagggctaaagtgcttttaactaagaattattagtcttttctgcttattttttcatcatagtttagaacactttatattaacgaatagtttatgaatctatttaggtttaaaaattgatacagttttataagttactttttcaaagactcgtgctgtctattgcataatgcactggaaggggaaaaaaaaggtgcacacgcgtggctttttcttgaatttgcagtttgaaaaataactacatggatgataagaaaacatggagtacagtcactttgagaaccttcaatcagctggtaacgtcttcgttaattggatactcaaaaaagatggatagcatgaatcacaagatggaaggaaatgcgggccacgaccacagtgatatgcatatgggagatggagatgataccttccgttaattcgggtttcaatcacttcgtttgtctatcgtatcgcagcctagtgaatatttaattctttcaataaaaaaggcttaaaatcaccatgaaaatcacaagaggaatctttcaacaagaacaatagtatacaatccatgaatgaaggagttcatatttgactagaactatacaaaggttttgtactgtttttactgtgagggtagcatctcatttatccagaatctcagaagggagaaacccaatcgctaaatcgatattatcacccagaagtttcaaataggcgattgtagaatatacacagggacaaccactcagtttatggcttcagtgcgcgcccagttctggaggaaagcattatcgaagtaataaaactttaaaaaagctctccgcaactaatgaggattgcagtatccagatacccttgttttctgccaaatgaacacttttactatgtcatataaacaaaaagtgccatttcttggtactgcttcagtcttaggaatggtcaatacgttattattacttaaatatacgattaataacatgctctgttgcgtatttagtaagtgtgtaaggaaactgtaatattacctaaccggtatcccacgtgtttcacgaa

SEQ ID NO: 155 - DNA, 4707 bp, Artificial Sequence
  PT254-R2S
agtatgacaagttttaatcgagatagtttgacgttcgttttttactttgaatatactcgtagtctttttactttttgagtataaaaaaaaaatgactagcaaaataaaattagtagtctaaaaaagaaagctcgcactcaggatcgaactaaggaccaacagatttgcaatctgctgcgctaccactgcgccatacgagcttttgaattatggtaattttgattatcctagaatgttatatctcaatatctcaatatattttggacatctatgaaacacccataaagcagccgctaccaaacagacaagattcagtatgtaaggtaaatacctttttgcacagttaaactacccaaacttattaaagcttgataaattactgaaattccacctttcagttagattcaggcctcatatagattagatatagggtacgtaacattctgtcaaccaagttgttggaatgaaagtctaaaatgtcatctattcggtagcactcatgttactagtatactgtcacatgcggtgtaacgtggggacataaaacagacatcaaatataatggaagctgaaatgcaaagatcgataatgtaataggaatgaaacatataaaacgaaaggagaagtaatggtaatattagtatgtagaaataccgattcaattttggggattcttatattctcgagagaatttctagtataatctgtatacataatattataggctttaccaacaatggaatttcgacaattatcatattattcaccaattaatcacaagttggtaatgagtttgataacaagttactttcttaacaacgttagtatcgtcaaaacactcggttttactcgagcttgtagcacaataataccgtgtagagttctgtattgttcttcttagtgcttgtatatgctcatcccgaccttccattatgctggtctcttcgcccgagaacctcagttacttttccttatgcgcatagacatacaagtggacagatgatgggtacgggcctctaatacatccaacactctacgccctcttcaagagctagaagggcaccctgcagttggaaagggaattatttcgtaaggcgagcccataccgtcattcatgcggaagagttaacacgattggaagtaggaatagtttcgaaccacggttactaatcctaataacggaacgctgtctgaaggatgagtgtcagcgagtgtaactcgatgagctacccagtagtcgtactggtcgagacaacccttgccaacagggagttcttcagagacatggaggctcaaaacgaaattattgacagcctagacatcaatagtcatacaacagaaagcgaccacccaactttggctgataatagcgtataaacaatgcatactttgtacgttcaaaatacaatgcagtagatatatttatgcatattacatataatacatatcacataggaagcaacaggcgcgttggacttttaattttcgaggaccgcgaatccttacatcacacccaatcccccacaagtgatcccccacacaccatagcttcaaaatgtttctactccttttttactcttccagattttctcggactccgcgcatcgccgtaccacttcaaaacacccaagcacagcatactaaatttcccctctttcttcctctagggtgtcgttaattacccgtactaaaggtttggaaaagaaaaaagacaccgcctcgtttctttttcttcgtcgaaaaaggcaataaaaatttttatcacgtttctttttcttgaaaatttttttttttgatttttttctctttcgatgacctcccattgatatttaagttaataaacggtcatcaatttctcaagtttcagtttcatttttcttgttctattacaactttttttacttcttgctcattagaaagaaagcatagcaatctaatctaagttttaattacaaaatgagagccggttccgatcaaattgaaggttctccacatcatgaatccgataactctattgccaccaagattttgaacttcggtcatacttgttggaagttgcaaagaccatatgttgtcaagggtatgatttctattgcttgcggtttgtttggtcgtgagttgtttaacaacagacacttgttttcttggggcttgatgtggaaagctttttttgctttggttcccatcctgtcctttaatttctttgccgccattatgaaccagatctacgatgttgatatcgacagaatcaacaagccagatttgccattggtttctggtgaaatgtctattgaaaccgcctggattttgtccattatcgttgctttgactggtttgatcgttaccatcaagttgaaatctgctcccttgttcgttttcatctacatctttggtattttcgctggtttcgcttattccgttccaccaattagatggaaacaatacccattcaccaatttcttgatcaccatctcttctcatgttggtttggctttcacttcttactctgctactacttctgctttgggtttaccatttgtttggaggccagctttctctttcattattgctttcatgaccgttatgggtatgaccattgctttcgctaaggatatctctgatattgaaggtgatgctaagtacggtgtttctactgttgctacaaaattgggtgctagaaacatgacctttgttgtctctggtgttctgttgttgaactacttggtttccatttccattggtatcatttggccacaggttttcaagtccaacatcatgattttgtctcatgccatcttggctttctgcttgatttttcaaactagagaattggccttggctaactatgcttctgctccatctagacaattcttcgaattcatctggttgttgtactacgccgaatacttcgtctacgtgttcattctcgagcatgcatctagagggccgcatcatgtaattagttatgtcacgcttacattcacgccctccccccacatccgctctaaccgaaaaggaaggagttagacaacctgaagtctaggtccctatttatttttttatagttatgttagtattaagaacgttatttatatttcaaatttttcttttttttctgtacagacgcgtgtacgcatgtaacattatactgaaaaccttgcttgagaaggttttgggacgctcgaaggctttaatttgcccagctctaatgcactcaatcccgaggcctgacgcgacatatcagcttagactagggcgggggtgttgacgtttggggttgaataaatctattgtactaatcggcttcaacgtgccccacgggtggcacctcaggaggggcccacagcgaggaagtaaactgttattcgtcggcgatggtggtagctaattatgttccttgccactacaatagtatctaagccgtgtaatgggaacatccacactttagtgaatcgatgtgcagcttcagaataccattccttgaagccgtgtccataaacaatatcgagagaccgattacactcgagcatgcatctagagggccgcatcatgtaattagttatgtcacgcttacattcacgccctccccccacatccgctctaaccgaaaaggaaggagttagacaacctgaagtctaggtccctatttatttttttatagttatgttagtattaagaacgttatttatatttcaaatttttcttttttttctgtacagacgcgtgtacgcatgtaacattatactgaaaaccttgcttgagaaggttttgggacgctcgaaggctttaatttgctttgcgaaaccctatgctctgttgttcggatttgaaattttaaaactacattaatgtgttagtttttctttctttctttctttgtcttgacgtgatttggacttctgtcttgcattcgcgtccattcatctgacccaatattccttttggttttgttatccttataaaaagaaaggaagcttcttagagggaaaaaaatgatgaagagtaatgccaaaatataaataaataaataaatatgaaaatcattttctatttttaatagaataagaagagcatcttaagattacaatttcaagaaatagtttacacagtatatccaataactccaataaactactttcctatacaaatttctatggtgggattaatagtaaaacttctgtacttctctaattcaccaagaaattaaggtaaacatctggtaagcactatccagctttttgctattacacatatggcttttctgcaatcatttcttcccattttgtctcaagccgttagtcttgaaaccacaggcggagtagagttacttgatgcggtattttacatgccttttttcactgcaaaaaaaatgaaatacatatttacacgatttgcaggacagtttacgatagtgagtatgcagaatagttaacacctttgttttatccttttgtgtcttaattatatgatataaaggcgcctggcgttatcggatagtaatagatgctagttatcaacatttcacaattgaaggaaataaagttgaagtactcaacaaaaacttacttcagaattaaatttttggggggaacataggcatcctatgacaggtgaccacaagcccctcaacgcaatctaatattttacaaagtggtaaaattctttcgttcttcgttttaatatacagtcatttattgattctattac

SEQ ID NO: 156 - protein, 92 aa, Artificial Sequence
  OstI-pro-alpha-f(I)
MRQVWFSWIVGLFLCFFNVSSAAPVNTTTEDETAQIPAEAVIGYSDLEGDFDVAVLPFSNSTNNGLLFINTTIASIAAKEEGVSLEKREAEA

SEQ ID NO: 157 - DNA, 7266 bp, Artificial Sequence
  OXC154-R3G/A18E/S60T/G351I/A383V/L451G
aagagtaaaaaattgtacttggcggataatgcctttagcggcttaactgtgccctccatggaaaaatcagtcaagatatccacatgtgtttttagtaaacaaattttgggacctaatgcttcaactaactccagtaattccttggtggtacgaacatccaatgaagcacacaagtttgtttgcttttcgtgcatgatattaaatagcttggcagcaacaggactaggatgagtagcagcacgttccttatatgtagctttcgacatgatttatcttcgtttcctgcaggtttttgttctgtgcagttgggttaagaatactgggcaatttcatgtttcttcaacactacatatgcgtatatataccaatctaagtctgtgctccttccttcgttcttccttctgttcggagattaccgaatcaaaaaaatttcaaagaaaccgaaatcaaaaaaaagaataaaaaaaaaatgatgaattgaattgaaaagctagcttatcgatgataagctgtcaaagatgagaattaattccacggactatagactatactagatactccgtctactgtacgatacacttccgctcaggtccttgtcctttaacgaggccttaccactcttttgttactctattgatccagctcagcaaaggcagtgtgatctaagattctatcttcgcgatgtagtaaaactagctagaccgagaaagagactagaaatgcaaaaggcacttctacaatggctgccatcattattatccgatgtgacgctgcagcttctcaatgatattcgaatacgctttgaggagatacagcctaatatccgacaaactgttttacagatttacgatcgtacttgttacccatcattgaattttgaacatccgaacctgggagttttccctgaaacagatagtatatttgaacctgtataataatatatagtctagcgctttacggaagacaatgtatgtatttcggttcctggagaaactattgcatctattgcataggtaatcttgcacgtcgcatccccggttcattttctgcgtttccatcttgcacttcaatagcatatctttgttcgcttgcctgtaacttacacgcgcctcgtatcttttaatgatggaataatttgggaatttactctgtgtttatttatttttatgttttgtatttggattttagaaagtaaataaagaaggtagaagagttacggaatgaagaaaaaaaaataaacaaaggtttaaaaaatttcaacaaaaagcgtactttacatatatatttattagacaagaaaagcagattaaatagatatacattcgattaacgataagtaaaatgtaaaatcacaggattttcgtgtgtggtcttctacacagacaagatgaaacaattcggcattaatacctgagagcaggaagagcaagataaaaggtagtatttgttggcgatccccctagagtcttttacatcttcggaaaacaaaaactattttttctttaatttctttttttactttctatttttaatttatatatttatattaaaaaatttaaattataattatttttatagcacgtgatgaaaaggaccgggaagctccaccccggttgataatcagaaaagccccaaaaacaggaagattgtataagcaaatatttaaattgtaaacgttaatattttgttaaaattcgcgttaaatttttgttaaatcagctcattttttaacgaatagcccgaaatcggcaaaatcccttataaatcaaaagaatagaccgagatagggttgagtgttgttccagtttccaacaagagtccactattaaagaacgtggactccaacgtcaaagggcgaaaaagggtctatcagggcgatggcccactacgtgaaccatcaccctaatcaagttttttggggtcgaggtgccgtaaagcagtaaatcggaagggtaaacggatgcccccatttagagcttgacggggaaagccggcgaacgtggcgagaaaggaagggaagaaagcgaaaggagcgggggctagggcggtgggaagtgtaggggtcacgctgggcgtaaccaccacacccgccgcgcttaatggggcgctacagggcgcgtggggatgatccactagtacggattagaagccgccgagcgggtgacagccctccgaaggaagactctcctccgtgcgtcctcgtcttcaccggtcgcgttcctgaaacgcagatgtgcctcgcgccgcactgctccgaacaataaagattctacaatactagcttttatggttatgaagaggaaaaattggcagtaacctggccccacaaaccttcaaatgaacgaatcaaattaacaaccataggatgataatgcgattagttttttagccttatttctggggtaattaatcagcgaagcgatgatttttgatctattaacagatatataaatgcaaaaactgcataaccactttaactaatactttcaacattttcggtttgtattacttcttattcaaatgtaataaaagtatcaacaaaaaattgttaatatacctctatactttaacgtcaaggagaaaaaaccccggatcggactactagcagctgtaatacgactcactatagggaatattaagcttaaacaatgaggcaggtttggttctcttggattgtgggattgttcctatgttttttcaacgtgtcttctgctgctccagtcaacactacaacagaagatgaaacggcacaaattccggctgaagctgtcatcggttactcagatttagaaggggatttcgatgttgctgttttgccattttccaacagcacaaataacgggttattgtttataaatactactattgccagcattgctgctaaagaagaaggggtatctctcgagaaaagagaggctgaagctatgccaggggaaaacttcttgaagtgcttctcccaatatatcccaaacaacgagactaacttaaagttagtttacactcaaaacaatccattatacatgtctgtcttaaactctactattcataacttaagatttacttccgatactacccctaagccattggttatcgtcaccccaacgcacgtctcccatatccaaggtactatcttatgttctaagaaggttggtttgcaaatccgtactagatctggtggtcacgactctgaaggtatgtcctatatctctcaagtcccatttgtcattgttgacttaagaaatatgagatccattaaaattgatgttcattctcaaactgcttgggtcgaagctggtgccaccttgggtgaagtttactactgggtcaacgaaaaaaacgaaaacttatctttagctgccggttactgtccaaccgtctgtgctggtggtcatttcggtggtggtggttacggtccattgatgcgtaactacggtttagctgctgacaacattattgacgctcatttagttaatgttcacggtaaggttttggacagaaaatctatgggtgaagatttattttgggccttgagaggtggtggtgctgaatccttcggtatcatcgttgcctggaagattcgtttagttgctgtcccttctaagtccaccatgttctccgtcaagaaaatcatggaaattcatgagttggtcaaattggttaacaagtggcaaaacatcgcttacaagtatgacaaggatttgttgttaatgactcacttcatcacccgtaatatcaccgacaaccaaggtaagaacaaaactgctattcacacctacttctcctccgtttttttgggtggtgtcgactccttagtcgatttgatgaacaaatcctttccagaattgggtattaagaaaactgattgtagacaattgtcttggattgacaccattatcttctattctggtgtcgttaactacgacaccgacaactttaacaaggaaattttgttggatcgttctgctggtcaaaatatcgccttcaaaatcaaattggactacgtcaaaaagccaatcccagaatctgttttcgttcaaattttggaaaagttgtacgaagaagacattggtgtgggtatgtatgctttgtatccatatggtggtatcatggacgaaatttccgaatctgccatcccattcccacacagagctggtattttatatgaattgtggtacatctgttcttgggaaaagcaagaagacaacgaaaagcatttaaactggattagaaacatttacaacttcatgaccccatacgtttctaagaacccaagaggcgcctatttgaactaccgtgacttagatattggtattaatgacccaaagaacccaaacaactatactcaagccagaatttggggtgaaaagtacttcggtaagaacttcgatagattagttaaggttaaaactttggtcgatccaaacaacttcttcagaaacgaacaatccatcccaccattgccaagacatcgtcacggccatcatcaccatcaccattagctcgagcatgcatctagagggccgcatcatgtaattagttatgtcacgcttacattcacgccctccccccacatccgctctaaccgaaaaggaaggagttagacaacctgaagtctaggtccctatttatttttttatagttatgttagtattaagaacgttatttatatttcaaatttttcttttttttctgtacagacgcgtgtacgcatgtaacattatactgaaaaccttgcttgagaaggttttgggacgctcgaaggctttaatttgcggccctgcattaatgaatcggccaacgcgcggggagaggcggtttgcgtattgggcgctcttccgcttcctcgctcactgactcgctgcgctcggtcgttcggctgcggcgagcggtatcagctcactcaaaggcggtaatacggttatccacagaatcaggggataacgcaggaaagaacatgtgagcaaaaggccagcaaaagcccaggaaccgtaaaaaggccgcgttgctggcgtttttccataggctccgcccccctgacgagcatcacaaaaatcgacgctcaagtcagaggtggcgaaacccgacaggactataaagataccaggcgtttccccctggaagctccctcgtgcgctctcctgttccgaccctgccgcttaccggatacctgtccgcctttctcccttcgggaagcgtggcgctttctcatagctcacgctgtaggtatctcagttcggtgtaggtcgttcgctccaagctgggctgtgtgcacgaaccccccgttcagcccgaccgctgcgccttatccggtaactatcgtcttgagtccaacccggtaagacacgacttatcgccactggcagcagccactggtaacaggattagcagagcgaggtatgtaggcggtgctacagagttcttgaagtggtggcctaactacggctacactagaagaacagtatttggtatctgcgctctgctgaagccagttaccttcggaaaaagagttggtagctcttgatccggcaaacaaaccaccgctggtagcggtggtttttttgtttgcaagcagcagattacgcgcagaaaaaaaggatctcaagaagatcctttgatcttttctacggggtctgacgctcagtggaacgaaaactcacgttaagggattttggtcatgagattatcaaaaaggatcttcacctagatccttttaaattaaaaatgaagttttaaatcaatctaaagtatatatgagtaaacttggtctgacagttaccaatgcttaatcagtgaggcacctatctcagcgatctgtctatttcgttcatccatagttgcctgactccccgtcgtgtagataactacgatacgggagcgcttaccatctggccccagtgctgcaatgataccgcgagacccacgctcaccggctccagatttatcagcaataaaccagccagccggaagggccgagcgcagaagtggtcctgcaactttatccgcctccattcagtctattaattgttgccgggaagctagagtaagtagttcgccagttaatagtttgcgcaacgttgttggcattgctacaggcatcgtggtgtcactctcgtcgtttggtatggcttcattcagctccggttcccaacgatcaaggcgagttacatgatcccccatgttgtgcaaaaaagcggttagctccttcggtcctccgatcgttgtcagaagtaagttggccgcagtgttatcactcatggttatggcagcactgcataattctcttactgtcatgccatccgtaagatgcttttctgtgactggtgagtactcaaccaagtcattctgagaatagtgtatgcggcgaccgagttgctcttgcccggcgtcaatacgggataatagtgtatcacatagcagaactttaaaagtgctcatcattggaaaacgttcttcggggcgaaaactctcaaggatcttaccgctgttgagatccagttcgatgtaacccactcgtgcacccaactgatcttcagcatcttttactttcaccagcgtttctgggtgagcaaaaacaggaaggcaaaatgccgcaaaaaagggaataagggcgacacggaaatgttgaatactcatactcttcctttttcaatgggtaataactgatataattaaattgaagctctaatttgtgagtttagtatacatgcatttacttataatacagttttttagttttgctggccgcatcttctcaaatatgcttcccagcctgcttttctgtaacgttcaccctctaccttagcatcccttccctttgcaaatagtcctcttccaacaataataatgtcagatcctgtagagaccacatcatccacggttctatactgttgacccaatgcgtctcccttgtcatctaaacccacaccgggtgtcataatcaaccaatcgtaaccttcatctcttccacccatgtctctttgagcaataaagccgataacaaaatctttgtcgctcttcgcaatgtcaacagtacccttagtatattctccagtagatagggagcccttgcatgacaattctgctaacatcaaaaggcctctaggttcctttgttacttcttctgccgcctgcttcaaaccgctaacaatacctgggcccaccacaccgtgtgcattcgtaatgtctgcccattctgctattctgtatacacccgcagagtactgcaatttgactgtattaccaatgtcagcaaattttctgtcttcg

SEQ ID NO: 158 - DNA, 7266 bp, Artificial Sequence
  OXC154-R3W/A18E/T49R/V97E/G351I/A383V/L451G
aagagtaaaaaattgtacttggcggataatgcctttagcggcttaactgtgccctccatggaaaaatcagtcaagatatccacatgtgtttttagtaaacaaattttgggacctaatgcttcaactaactccagtaattccttggtggtacgaacatccaatgaagcacacaagtttgtttgcttttcgtgcatgatattaaatagcttggcagcaacaggactaggatgagtagcagcacgttccttatatgtagctttcgacatgatttatcttcgtttcctgcaggtttttgttctgtgcagttgggttaagaatactgggcaatttcatgtttcttcaacactacatatgcgtatatataccaatctaagtctgtgctccttccttcgttcttccttctgttcggagattaccgaatcaaaaaaatttcaaagaaaccgaaatcaaaaaaaagaataaaaaaaaaatgatgaattgaattgaaaagctagcttatcgatgataagctgtcaaagatgagaattaattccacggactatagactatactagatactccgtctactgtacgatacacttccgctcaggtccttgtcctttaacgaggccttaccactcttttgttactctattgatccagctcagcaaaggcagtgtgatctaagattctatcttcgcgatgtagtaaaactagctagaccgagaaagagactagaaatgcaaaaggcacttctacaatggctgccatcattattatccgatgtgacgctgcagcttctcaatgatattcgaatacgctttgaggagatacagcctaatatccgacaaactgttttacagatttacgatcgtacttgttacccatcattgaattttgaacatccgaacctgggagttttccctgaaacagatagtatatttgaacctgtataataatatatagtctagcgctttacggaagacaatgtatgtatttcggttcctggagaaactattgcatctattgcataggtaatcttgcacgtcgcatccccggttcattttctgcgtttccatcttgcacttcaatagcatatctttgttcgcttgcctgtaacttacacgcgcctcgtatcttttaatgatggaataatttgggaatttactctgtgtttatttatttttatgttttgtatttggattttagaaagtaaataaagaaggtagaagagttacggaatgaagaaaaaaaaataaacaaaggtttaaaaaatttcaacaaaaagcgtactttacatatatatttattagacaagaaaagcagattaaatagatatacattcgattaacgataagtaaaatgtaaaatcacaggattttcgtgtgtggtcttctacacagacaagatgaaacaattcggcattaatacctgagagcaggaagagcaagataaaaggtagtatttgttggcgatccccctagagtcttttacatcttcggaaaacaaaaactattttttctttaatttctttttttactttctatttttaatttatatatttatattaaaaaatttaaattataattatttttatagcacgtgatgaaaaggaccgggaagctccaccccggttgataatcagaaaagccccaaaaacaggaagattgtataagcaaatatttaaattgtaaacgttaatattttgttaaaattcgcgttaaatttttgttaaatcagctcattttttaacgaatagcccgaaatcggcaaaatcccttataaatcaaaagaatagaccgagatagggttgagtgttgttccagtttccaacaagagtccactattaaagaacgtggactccaacgtcaaagggcgaaaaagggtctatcagggcgatggcccactacgtgaaccatcaccctaatcaagttttttggggtcgaggtgccgtaaagcagtaaatcggaagggtaaacggatgcccccatttagagcttgacggggaaagccggcgaacgtggcgagaaaggaagggaagaaagcgaaaggagcgggggctagggcggtgggaagtgtaggggtcacgctgggcgtaaccaccacacccgccgcgcttaatggggcgctacagggcgcgtggggatgatccactagtacggattagaagccgccgagcgggtgacagccctccgaaggaagactctcctccgtgcgtcctcgtcttcaccggtcgcgttcctgaaacgcagatgtgcctcgcgccgcactgctccgaacaataaagattctacaatactagcttttatggttatgaagaggaaaaattggcagtaacctggccccacaaaccttcaaatgaacgaatcaaattaacaaccataggatgataatgcgattagttttttagccttatttctggggtaattaatcagcgaagcgatgatttttgatctattaacagatatataaatgcaaaaactgcataaccactttaactaatactttcaacattttcggtttgtattacttcttattcaaatgtaataaaagtatcaacaaaaaattgttaatatacctctatactttaacgtcaaggagaaaaaaccccggatcggactactagcagctgtaatacgactcactatagggaatattaagcttaaacaatgaggcaggtttggttctcttggattgtgggattgttcctatgttttttcaacgtgtcttctgctgctccagtcaacactacaacagaagatgaaacggcacaaattccggctgaagctgtcatcggttactcagatttagaaggggatttcgatgttgctgttttgccattttccaacagcacaaataacgggttattgtttataaatactactattgccagcattgctgctaaagaagaaggggtatctctcgagaaaagagaggctgaagctatgccatgggaaaacttcttgaagtgcttctcccaatatatcccaaacaacgagactaacttaaagttagtttacactcaaaacaatccattatacatgtctgtcttaaactctactattcataacttaagatttacttccgatcggacccctaagccattggttatcgtcaccccatctcacgtctcccatatccaaggtactatcttatgttctaagaaggttggtttgcaaatccgtactagatctggtggtcacgactctgaaggtatgtcctatatctctcaagagccatttgtcattgttgacttaagaaatatgagatccattaaaattgatgttcattctcaaactgcttgggtcgaagctggtgccaccttgggtgaagtttactactgggtcaacgaaaaaaacgaaaacttatctttagctgccggttactgtccaaccgtctgtgctggtggtcatttcggtggtggtggttacggtccattgatgcgtaactacggtttagctgctgacaacattattgacgctcatttagttaatgttcacggtaaggttttggacagaaaatctatgggtgaagatttattttgggccttgagaggtggtggtgctgaatccttcggtatcatcgttgcctggaagattcgtttagttgctgtcccttctaagtccaccatgttctccgtcaagaaaatcatggaaattcatgagttggtcaaattggttaacaagtggcaaaacatcgcttacaagtatgacaaggatttgttgttaatgactcacttcatcacccgtaatatcaccgacaaccaaggtaagaacaaaactgctattcacacctacttctcctccgtttttttgggtggtgtcgactccttagtcgatttgatgaacaaatcctttccagaattgggtattaagaaaactgattgtagacaattgtcttggattgacaccattatcttctattctggtgtcgttaactacgacaccgacaactttaacaaggaaattttgttggatcgttctgctggtcaaaatatcgccttcaaaatcaaattggactacgtcaaaaagccaatcccagaatctgttttcgttcaaattttggaaaagttgtacgaagaagacattggtgtgggtatgtatgctttgtatccatatggtggtatcatggacgaaatttccgaatctgccatcccattcccacacagagctggtattttatatgaattgtggtacatctgttcttgggaaaagcaagaagacaacgaaaagcatttaaactggattagaaacatttacaacttcatgaccccatacgtttctaagaacccaagaggcgcctatttgaactaccgtgacttagatattggtattaatgacccaaagaacccaaacaactatactcaagccagaatttggggtgaaaagtacttcggtaagaacttcgatagattagttaaggttaaaactttggtcgatccaaacaacttcttcagaaacgaacaatccatcccaccattgccaagacatcgtcacggccatcatcaccatcaccattagctcgagcatgcatctagagggccgcatcatgtaattagttatgtcacgcttacattcacgccctccccccacatccgctctaaccgaaaaggaaggagttagacaacctgaagtctaggtccctatttatttttttatagttatgttagtattaagaacgttatttatatttcaaatttttcttttttttctgtacagacgcgtgtacgcatgtaacattatactgaaaaccttgcttgagaaggttttgggacgctcgaaggctttaatttgcggccctgcattaatgaatcggccaacgcgcggggagaggcggtttgcgtattgggcgctcttccgcttcctcgctcactgactcgctgcgctcggtcgttcggctgcggcgagcggtatcagctcactcaaaggcggtaatacggttatccacagaatcaggggataacgcaggaaagaacatgtgagcaaaaggccagcaaaagcccaggaaccgtaaaaaggccgcgttgctggcgtttttccataggctccgcccccctgacgagcatcacaaaaatcgacgctcaagtcagaggtggcgaaacccgacaggactataaagataccaggcgtttccccctggaagctccctcgtgcgctctcctgttccgaccctgccgcttaccggatacctgtccgcctttctcccttcgggaagcgtggcgctttctcatagctcacgctgtaggtatctcagttcggtgtaggtcgttcgctccaagctgggctgtgtgcacgaaccccccgttcagcccgaccgctgcgccttatccggtaactatcgtcttgagtccaacccggtaagacacgacttatcgccactggcagcagccactggtaacaggattagcagagcgaggtatgtaggcggtgctacagagttcttgaagtggtggcctaactacggctacactagaagaacagtatttggtatctgcgctctgctgaagccagttaccttcggaaaaagagttggtagctcttgatccggcaaacaaaccaccgctggtagcggtggtttttttgtttgcaagcagcagattacgcgcagaaaaaaaggatctcaagaagatcctttgatcttttctacggggtctgacgctcagtggaacgaaaactcacgttaagggattttggtcatgagattatcaaaaaggatcttcacctagatccttttaaattaaaaatgaagttttaaatcaatctaaagtatatatgagtaaacttggtctgacagttaccaatgcttaatcagtgaggcacctatctcagcgatctgtctatttcgttcatccatagttgcctgactccccgtcgtgtagataactacgatacgggagcgcttaccatctggccccagtgctgcaatgataccgcgagacccacgctcaccggctccagatttatcagcaataaaccagccagccggaagggccgagcgcagaagtggtcctgcaactttatccgcctccattcagtctattaattgttgccgggaagctagagtaagtagttcgccagttaatagtttgcgcaacgttgttggcattgctacaggcatcgtggtgtcactctcgtcgtttggtatggcttcattcagctccggttcccaacgatcaaggcgagttacatgatcccccatgttgtgcaaaaaagcggttagctccttcggtcctccgatcgttgtcagaagtaagttggccgcagtgttatcactcatggttatggcagcactgcataattctcttactgtcatgccatccgtaagatgcttttctgtgactggtgagtactcaaccaagtcattctgagaatagtgtatgcggcgaccgagttgctcttgcccggcgtcaatacgggataatagtgtatcacatagcagaactttaaaagtgctcatcattggaaaacgttcttcggggcgaaaactctcaaggatcttaccgctgttgagatccagttcgatgtaacccactcgtgcacccaactgatcttcagcatcttttactttcaccagcgtttctgggtgagcaaaaacaggaaggcaaaatgccgcaaaaaagggaataagggcgacacggaaatgttgaatactcatactcttcctttttcaatgggtaataactgatataattaaattgaagctctaatttgtgagtttagtatacatgcatttacttataatacagttttttagttttgctggccgcatcttctcaaatatgcttcccagcctgcttttctgtaacgttcaccctctaccttagcatcccttccctttgcaaatagtcctcttccaacaataataatgtcagatcctgtagagaccacatcatccacggttctatactgttgacccaatgcgtctcccttgtcatctaaacccacaccgggtgtcataatcaaccaatcgtaaccttcatctcttccacccatgtctctttgagcaataaagccgataacaaaatctttgtcgctcttcgcaatgtcaacagtacccttagtatattctccagtagatagggagcccttgcatgacaattctgctaacatcaaaaggcctctaggttcctttgttacttcttctgccgcctgcttcaaaccgctaacaatacctgggcccaccacaccgtgtgcattcgtaatgtctgcccattctgctattctgtatacacccgcagagtactgcaatttgactgtattaccaatgtcagcaaattttctgtcttcg

SEQ ID NO: 159 - DNA, 7266 bp, Artificial Sequence; identical to SEQ ID NO: 158
  OXC154-R3W/A18E/T49R/V97E/G351I/A383V/L451G

SEQ ID NO: 160 - DNA, 7266 bp, Artificial Sequence
  OXC154-R3T/S60T/G351I/A383V/L451G
aagagtaaaaaattgtacttggcggataatgcctttagcggcttaactgtgccctccatggaaaaatcagtcaagatatccacatgtgtttttagtaaacaaattttgggacctaatgcttcaactaactccagtaattccttggtggtacgaacatccaatgaagcacacaagtttgtttgcttttcgtgcatgatattaaatagcttggcagcaacaggactaggatgagtagcagcacgttccttatatgtagctttcgacatgatttatcttcgtttcctgcaggtttttgttctgtgcagttgggttaagaatactgggcaatttcatgtttcttcaacactacatatgcgtatatataccaatctaagtctgtgctccttccttcgttcttccttctgttcggagattaccgaatcaaaaaaatttcaaagaaaccgaaatcaaaaaaaagaataaaaaaaaaatgatgaattgaattgaaaagctagcttatcgatgataagctgtcaaagatgagaattaattccacggactatagactatactagatactccgtctactgtacgatacacttccgctcaggtccttgtcctttaacgaggccttaccactcttttgttactctattgatccagctcagcaaaggcagtgtgatctaagattctatcttcgcgatgtagtaaaactagctagaccgagaaagagactagaaatgcaaaaggcacttctacaatggctgccatcattattatccgatgtgacgctgcagcttctcaatgatattcgaatacgctttgaggagatacagcctaatatccgacaaactgttttacagatttacgatcgtacttgttacccatcattgaattttgaacatccgaacctgggagttttccctgaaacagatagtatatttgaacctgtataataatatatagtctagcgctttacggaagacaatgtatgtatttcggttcctggagaaactattgcatctattgcataggtaatcttgcacgtcgcatccccggttcattttctgcgtttccatcttgcacttcaatagcatatctttgttcgcttgcctgtaacttacacgcgcctcgtatcttttaatgatggaataatttgggaatttactctgtgtttatttatttttatgttttgtatttggattttagaaagtaaataaagaaggtagaagagttacggaatgaagaaaaaaaaataaacaaaggtttaaaaaatttcaacaaaaagcgtactttacatatatatttattagacaagaaaagcagattaaatagatatacattcgattaacgataagtaaaatgtaaaatcacaggattttcgtgtgtggtcttctacacagacaagatgaaacaattcggcattaatacctgagagcaggaagagcaagataaaaggtagtatttgttggcgatccccctagagtcttttacatcttcggaaaacaaaaactattttttctttaatttctttttttactttctatttttaatttatatatttatattaaaaaatttaaattataattatttttatagcacgtgatgaaaaggaccgggaagctccaccccggttgataatcagaaaagccccaaaaacaggaagattgtataagcaaatatttaaattgtaaacgttaatattttgttaaaattcgcgttaaatttttgttaaatcagctcattttttaacgaatagcccgaaatcggcaaaatcccttataaatcaaaagaatagaccgagatagggttgagtgttgttccagtttccaacaagagtccactattaaagaacgtggactccaacgtcaaagggcgaaaaagggtctatcagggcgatggcccactacgtgaaccatcaccctaatcaagttttttggggtcgaggtgccgtaaagcagtaaatcggaagggtaaacggatgcccccatttagagcttgacggggaaagccggcgaacgtggcgagaaaggaagggaagaaagcgaaaggagcgggggctagggcggtgggaagtgtaggggtcacgctgggcgtaaccaccacacccgccgcgcttaatggggcgctacagggcgcgtggggatgatccactagtacggattagaagccgccgagcgggtgacagccctccgaaggaagactctcctccgtgcgtcctcgtcttcaccggtcgcgttcctgaaacgcagatgtgcctcgcgccgcactgctccgaacaataaagattctacaatactagcttttatggttatgaagaggaaaaattggcagtaacctggccccacaaaccttcaaatgaacgaatcaaattaacaaccataggatgataatgcgattagttttttagccttatttctggggtaattaatcagcgaagcgatgatttttgatctattaacagatatataaatgcaaaaactgcataaccactttaactaatactttcaacattttcggtttgtattacttcttattcaaatgtaataaaagtatcaacaaaaaattgttaatatacctctatactttaacgtcaaggagaaaaaaccccggatcggactactagcagctgtaatacgactcactatagggaatattaagcttaaacaatgaggcaggtttggttctcttggattgtgggattgttcctatgttttttcaacgtgtcttctgctgctccagtcaacactacaacagaagatgaaacggcacaaattccggctgaagctgtcatcggttactcagatttagaaggggatttcgatgttgctgttttgccattttccaacagcacaaataacgggttattgtttataaatactactattgccagcattgctgctaaagaagaaggggtatctctcgagaaaagagaggctgaagctatgccaacggaaaacttcttgaagtgcttctcccaatatatcccaaacaacgctactaacttaaagttagtttacactcaaaacaatccattatacatgtctgtcttaaactctactattcataacttaagatttacttccgatactacccctaagccattggttatcgtcaccccaacgcacgtctcccatatccaaggtactatcttatgttctaagaaggttggtttgcaaatccgtactagatctggtggtcacgactctgaaggtatgtcctatatctctcaagtcccatttgtcattgttgacttaagaaatatgagatccattaaaattgatgttcattctcaaactgcttgggtcgaagctggtgccaccttgggtgaagtttactactgggtcaacgaaaaaaacgaaaacttatctttagctgccggttactgtccaaccgtctgtgctggtggtcatttcggtggtggtggttacggtccattgatgcgtaactacggtttagctgctgacaacattattgacgctcatttagttaatgttcacggtaaggttttggacagaaaatctatgggtgaagatttattttgggccttgagaggtggtggtgctgaatccttcggtatcatcgttgcctggaagattcgtttagttgctgtcccttctaagtccaccatgttctccgtcaagaaaatcatggaaattcatgagttggtcaaattggttaacaagtggcaaaacatcgcttacaagtatgacaaggatttgttgttaatgactcacttcatcacccgtaatatcaccgacaaccaaggtaagaacaaaactgctattcacacctacttctcctccgtttttttgggtggtgtcgactccttagtcgatttgatgaacaaatcctttccagaattgggtattaagaaaactgattgtagacaattgtcttggattgacaccattatcttctattctggtgtcgttaactacgacaccgacaactttaacaaggaaattttgttggatcgttctgctggtcaaaatatcgccttcaaaatcaaattggactacgtcaaaaagccaatcccagaatctgttttcgttcaaattttggaaaagttgtacgaagaagacattggtgtgggtatgtatgctttgtatccatatggtggtatcatggacgaaatttccgaatctgccatcccattcccacacagagctggtattttatatgaattgtggtacatctgttcttgggaaaagcaagaagacaacgaaaagcatttaaactggattagaaacatttacaacttcatgaccccatacgtttctaagaacccaagaggcgcctatttgaactaccgtgacttagatattggtattaatgacccaaagaacccaaacaactatactcaagccagaatttggggtgaaaagtacttcggtaagaacttcgatagattagttaaggttaaaactttggtcgatccaaacaacttcttcagaaacgaacaatccatcccaccattgccaagacatcgtcacggccatcatcaccatcaccattagctcgagcatgcatctagagggccgcatcatgtaattagttatgtcacgcttacattcacgccctccccccacatccgctctaaccgaaaaggaaggagttagacaacctgaagtctaggtccctatttatttttttatagttatgttagtattaagaacgttatttatatttcaaatttttcttttttttctgtacagacgcgtgtacgcatgtaacattatactgaaaaccttgcttgagaaggttttgggacgctcgaaggctttaatttgcggccctgcattaatgaatcggccaacgcgcggggagaggcggtttgcgtattgggcgctcttccgcttcctcgctcactgactcgctgcgctcggtcgttcggctgcggcgagcggtatcagctcactcaaaggcggtaatacggttatccacagaatcaggggataacgcaggaaagaacatgtgagcaaaaggccagcaaaagcccaggaaccgtaaaaaggccgcgttgctggcgtttttccataggctccgcccccctgacgagcatcacaaaaatcgacgctcaagtcagaggtggcgaaacccgacaggactataaagataccaggcgtttccccctggaagctccctcgtgcgctctcctgttccgaccctgccgcttaccggatacctgtccgcctttctcccttcgggaagcgtggcgctttctcatagctcacgctgtaggtatctcagttcggtgtaggtcgttcgctccaagctgggctgtgtgcacgaaccccccgttcagcccgaccgctgcgccttatccggtaactatcgtcttgagtccaacccggtaagacacgacttatcgccactggcagcagccactggtaacaggattagcagagcgaggtatgtaggcggtgctacagagttcttgaagtggtggcctaactacggctacactagaagaacagtatttggtatctgcgctctgctgaagccagttaccttcggaaaaagagttggtagctcttgatccggcaaacaaaccaccgctggtagcggtggtttttttgtttgcaagcagcagattacgcgcagaaaaaaaggatctcaagaagatcctttgatcttttctacggggtctgacgctcagtggaacgaaaactcacgttaagggattttggtcatgagattatcaaaaaggatcttcacctagatccttttaaattaaaaatgaagttttaaatcaatctaaagtatatatgagtaaacttggtctgacagttaccaatgcttaatcagtgaggcacctatctcagcgatctgtctatttcgttcatccatagttgcctgactccccgtcgtgtagataactacgatacgggagcgcttaccatctggccccagtgctgcaatgataccgcgagacccacgctcaccggctccagatttatcagcaataaaccagccagccggaagggccgagcgcagaagtggtcctgcaactttatccgcctccattcagtctattaattgttgccgggaagctagagtaagtagttcgccagttaatagtttgcgcaacgttgttggcattgctacaggcatcgtggtgtcactctcgtcgtttggtatggcttcattcagctccggttcccaacgatcaaggcgagttacatgatcccccatgttgtgcaaaaaagcggttagctccttcggtcctccgatcgttgtcagaagtaagttggccgcagtgttatcactcatggttatggcagcactgcataattctcttactgtcatgccatccgtaagatgcttttctgtgactggtgagtactcaaccaagtcattctgagaatagtgtatgcggcgaccgagttgctcttgcccggcgtcaatacgggataatagtgtatcacatagcagaactttaaaagtgctcatcattggaaaacgttcttcggggcgaaaactctcaaggatcttaccgctgttgagatccagttcgatgtaacccactcgtgcacccaactgatcttcagcatcttttactttcaccagcgtttctgggtgagcaaaaacaggaaggcaaaatgccgcaaaaaagggaataagggcgacacggaaatgttgaatactcatactcttcctttttcaatgggtaataactgatataattaaattgaagctctaatttgtgagtttagtatacatgcatttacttataatacagttttttagttttgctggccgcatcttctcaaatatgcttcccagcctgcttttctgtaacgttcaccctctaccttagcatcccttccctttgcaaatagtcctcttccaacaataataatgtcagatcctgtagagaccacatcatccacggttctatactgttgacccaatgcgtctcccttgtcatctaaacccacaccgggtgtcataatcaaccaatcgtaaccttcatctcttccacccatgtctctttgagcaataaagccgataacaaaatctttgtcgctcttcgcaatgtcaacagtacccttagtatattctccagtagatagggagcccttgcatgacaattctgctaacatcaaaaggcctctaggttcctttgttacttcttctgccgcctgcttcaaaccgctaacaatacctgggcccaccacaccgtgtgcattcgtaatgtctgcccattctgctattctgtatacacccgcagagtactgcaatttgactgtattaccaatgtcagcaaattttctgtcttcg

SEQ ID NO: 161 - protein, 524 aa, Artificial Sequence
  OXC154-R3G/A18E/S60T/G351I/A383V/L451G
MPGENFLKCFSQYIPNNETNLKLVYTQNNPLYMSVLNSTIHNLRFTSDTTPKPLVIVTPTHVSHIQGTILCSKKVGLQIRTRSGGHDSEGMSYISQVPFVIVDLRNMRSIKIDVHSQTAWVEAGATLGEVYYWVNEKNENLSLAAGYCPTVCAGGHFGGGGYGPLMRNYGLAADNIIDAHLVNVHGKVLDRKSMGEDLFWALRGGGAESFGIIVAWKIRLVAVPSKSTMFSVKKIMEIHELVKLVNKWQNIAYKYDKDLLLMTHFITRNITDNQGKNKTAIHTYFSSVFLGGVDSLVDLMNKSFPELGIKKTDCRQLSWIDTIIFYSGVVNYDTDNFNKEILLDRSAGQNIAFKIKLDYVKKPIPESVFVQILEKLYEEDIGVGMYALYPYGGIMDEISESAIPFPHRAGILYELWYICSWEKQEDNEKHLNWIRNIYNFMTPYVSKNPRGAYLNYRDLDIGINDPKNPNNYTQARIWGEKYFGKNFDRLVKVKTLVDPNNFFRNEQSIPPLPRHRHGHHHHHH

SEQ ID NO: 162 - protein, 524 aa, Artificial Sequence
  OXC154-R3W/A18E/T49R/V97E/G351I/A383V/L451G
MPWENFLKCFSQYIPNNETNLKLVYTQNNPLYMSVLNSTIHNLRFTSDRTPKPLVIVTPSHVSHIQGTILCSKKVGLQIRTRSGGHDSEGMSYISQEPFVIVDLRNMRSIKIDVHSQTAWVEAGATLGEVYYWVNEKNENLSLAAGYCPTVCAGGHFGGGGYGPLMRNYGLAADNIIDAHLVNVHGKVLDRKSMGEDLFWALRGGGAESFGIIVAWKIRLVAVPSKSTMFSVKKIMEIHELVKLVNKWQNIAYKYDKDLLLMTHFITRNITDNQGKNKTAIHTYFSSVFLGGVDSLVDLMNKSFPELGIKKTDCRQLSWIDTIIFYSGVVNYDTDNFNKEILLDRSAGQNIAFKIKLDYVKKPIPESVFVQILEKLYEEDIGVGMYALYPYGGIMDEISESAIPFPHRAGILYELWYICSWEKQEDNEKHLNWIRNIYNFMTPYVSKNPRGAYLNYRDLDIGINDPKNPNNYTQARIWGEKYFGKNFDRLVKVKTLVDPNNFFRNEQSIPPLPRHRHGHHHHHH

SEQ ID NO: 163 - protein, 524 aa, Artificial Sequence; identical to SEQ ID NO: 162
  OXC154-R3W/A18E/T49R/V97E/G351I/A383V/L451G

SEQ ID NO: 164 - protein, 524 aa, Artificial Sequence
  OXC154-R3T/S60T/G351I/A383V/L451G
MPTENFLKCFSQYIPNNATNLKLVYTQNNPLYMSVLNSTIHNLRFTSDTTPKPLVIVTPTHVSHIQGTILCSKKVGLQIRTRSGGHDSEGMSYISQVPFVIVDLRNMRSIKIDVHSQTAWVEAGATLGEVYYWVNEKNENLSLAAGYCPTVCAGGHFGGGGYGPLMRNYGLAADNIIDAHLVNVHGKVLDRKSMGEDLFWALRGGGAESFGIIVAWKIRLVAVPSKSTMFSVKKIMEIHELVKLVNKWQNIAYKYDKDLLLMTHFITRNITDNQGKNKTAIHTYFSSVFLGGVDSLVDLMNKSFPELGIKKTDCRQLSWIDTIIFYSGVVNYDTDNFNKEILLDRSAGQNIAFKIKLDYVKKPIPESVFVQILEKLYEEDIGVGMYALYPYGGIMDEISESAIPFPHRAGILYELWYICSWEKQEDNEKHLNWIRNIYNFMTPYVSKNPRGAYLNYRDLDIGINDPKNPNNYTQARIWGEKYFGKNFDRLVKVKTLVDPNNFFRNEQSIPPLPRHRHGHHHHHH

SEQ ID NO: 165 - DNA, 7266 bp, Artificial Sequence
  OXC158-I351G
aagagtaaaaaattgtacttggcggataatgcctttagcggcttaactgtgccctccatggaaaaatcagtcaagatatccacatgtgtttttagtaaacaaattttgggacctaatgcttcaactaactccagtaattccttggtggtacgaacatccaatgaagcacacaagtttgtttgcttttcgtgcatgatattaaatagcttggcagcaacaggactaggatgagtagcagcacgttccttatatgtagctttcgacatgatttatcttcgtttcctgcaggtttttgttctgtgcagttgggttaagaatactgggcaatttcatgtttcttcaacactacatatgcgtatatataccaatctaagtctgtgctccttccttcgttcttccttctgttcggagattaccgaatcaaaaaaatttcaaagaaaccgaaatcaaaaaaaagaataaaaaaaaaatgatgaattgaattgaaaagctagcttatcgatgataagctgtcaaagatgagaattaattccacggactatagactatactagatactccgtctactgtacgatacacttccgctcaggtccttgtcctttaacgaggccttaccactcttttgttactctattgatccagctcagcaaaggcagtgtgatctaagattctatcttcgcgatgtagtaaaactagctagaccgagaaagagactagaaatgcaaaaggcacttctacaatggctgccatcattattatccgatgtgacgctgcagcttctcaatgatattcgaatacgctttgaggagatacagcctaatatccgacaaactgttttacagatttacgatcgtacttgttacccatcattgaattttgaacatccgaacctgggagttttccctgaaacagatagtatatttgaacctgtataataatatatagtctagcgctttacggaagacaatgtatgtatttcggttcctggagaaactattgcatctattgcataggtaatcttgcacgtcgcatccccggttcattttctgcgtttccatcttgcacttcaatagcatatctttgttcgcttgcctgtaacttacacgcgcctcgtatcttttaatgatggaataatttgggaatttactctgtgtttatttatttttatgttttgtatttggattttagaaagtaaataaagaaggtagaagagttacggaatgaagaaaaaaaaataaacaaaggtttaaaaaatttcaacaaaaagcgtactttacatatatatttattagacaagaaaagcagattaaatagatatacattcgattaacgataagtaaaatgtaaaatcacaggattttcgtgtgtggtcttctacacagacaagatgaaacaattcggcattaatacctgagagcaggaagagcaagataaaaggtagtatttgttggcgatccccctagagtcttttacatcttcggaaaacaaaaactattttttctttaatttctttttttactttctatttttaatttatatatttatattaaaaaatttaaattataattatttttatagcacgtgatgaaaaggaccgggaagctccaccccggttgataatcagaaaagccccaaaaacaggaagattgtataagcaaatatttaaattgtaaacgttaatattttgttaaaattcgcgttaaatttttgttaaatcagctcattttttaacgaatagcccgaaatcggcaaaatcccttataaatcaaaagaatagaccgagatagggttgagtgttgttccagtttccaacaagagtccactattaaagaacgtggactccaacgtcaaagggcgaaaaagggtctatcagggcgatggcccactacgtgaaccatcaccctaatcaagttttttggggtcgaggtgccgtaaagcagtaaatcggaagggtaaacggatgcccccatttagagcttgacggggaaagccggcgaacgtggcgagaaaggaagggaagaaagcgaaaggagcgggggctagggcggtgggaagtgtaggggtcacgctgggcgtaaccaccacacccgccgcgcttaatggggcgctacagggcgcgtggggatgatccactagtacggattagaagccgccgagcgggtgacagccctccgaaggaagactctcctccgtgcgtcctcgtcttcaccggtcgcgttcctgaaacgcagatgtgcctcgcgccgcactgctccgaacaataaagattctacaatactagcttttatggttatgaagaggaaaaattggcagtaacctggccccacaaaccttcaaatgaacgaatcaaattaacaaccataggatgataatgcgattagttttttagccttatttctggggtaattaatcagcgaagcgatgatttttgatctattaacagatatataaatgcaaaaactgcataaccactttaactaatactttcaacattttcggtttgtattacttcttattcaaatgtaataaaagtatcaacaaaaaattgttaatatacctctatactttaacgtcaaggagaaaaaaccccggatcggactactagcagctgtaatacgactcactatagggaatattaagcttaaacaatgaggcaggtttggttctcttggattgtgggattgttcctatgttttttcaacgtgtcttctgctgctccagtcaacactacaacagaagatgaaacggcacaaattccggctgaagctgtcatcggttactcagatttagaaggggatttcgatgttgctgttttgccattttccaacagcacaaataacgggttattgtttataaatactactattgccagcattgctgctaaagaagaaggggtatctctcgagaaaagagaggctgaagctatgccatgggaaaacttcttgaagtgcttctcccaatatatcccaaacaacgagactaacttaaagttagtttacactcaaaacaatccattatacatgtctgtcttaaactctactattcataacttaagatttacttccgatcggacccctaagccattggttatcgtcaccccatctcacgtctcccatatccaaggtactatcttatgttctaagaaggttggtttgcaaatccgtactagatctggtggtcacgactctgaaggtatgtcctatatctctcaagagccatttgtcattgttgacttaagaaatatgagatccattaaaattgatgttcattctcaaactgcttgggtcgaagctggtgccaccttgggtgaagtttactactgggtcaacgaaaaaaacgaaaacttatctttagctgccggttactgtccaaccgtctgtgctggtggtcatttcggtggtggtggttacggtccattgatgcgtaactacggtttagctgctgacaacattattgacgctcatttagttaatgttcacggtaaggttttggacagaaaatctatgggtgaagatttattttgggccttgagaggtggtggtgctgaatccttcggtatcatcgttgcctggaagattcgtttagttgctgtcccttctaagtccaccatgttctccgtcaagaaaatcatggaaattcatgagttggtcaaattggttaacaagtggcaaaacatcgcttacaagtatgacaaggatttgttgttaatgactcacttcatcacccgtaatatcaccgacaaccaaggtaagaacaaaactgctattcacacctacttctcctccgtttttttgggtggtgtcgactccttagtcgatttgatgaacaaatcctttccagaattgggtattaagaaaactgattgtagacaattgtcttggattgacaccattatcttctattctggtgtcgttaactacgacaccgacaactttaacaaggaaattttgttggatcgttctgctggtcaaaatggtgccttcaaaatcaaattggactacgtcaaaaagccaatcccagaatctgttttcgttcaaattttggaaaagttgtacgaagaagacattggtgtgggtatgtatgctttgtatccatatggtggtatcatggacgaaatttccgaatctgccatcccattcccacacagagctggtattttatatgaattgtggtacatctgttcttgggaaaagcaagaagacaacgaaaagcatttaaactggattagaaacatttacaacttcatgaccccatacgtttctaagaacccaagaggcgcctatttgaactaccgtgacttagatattggtattaatgacccaaagaacccaaacaactatactcaagccagaatttggggtgaaaagtacttcggtaagaacttcgatagattagttaaggttaaaactttggtcgatccaaacaacttcttcagaaacgaacaatccatcccaccattgccaagacatcgtcacggccatcatcaccatcaccattagctcgagcatgcatctagagggccgcatcatgtaattagttatgtcacgcttacattcacgccctccccccacatccgctctaaccgaaaaggaaggagttagacaacctgaagtctaggtccctatttatttttttatagttatgttagtattaagaacgttatttatatttcaaatttttcttttttttctgtacagacgcgtgtacgcatgtaacattatactgaaaaccttgcttgagaaggttttgggacgctcgaaggctttaatttgcggccctgcattaatgaatcggccaacgcgcggggagaggcggtttgcgtattgggcgctcttccgcttcctcgctcactgactcgctgcgctcggtcgttcggctgcggcgagcggtatcagctcactcaaaggcggtaatacggttatccacagaatcaggggataacgcaggaaagaacatgtgagcaaaaggccagcaaaagcccaggaaccgtaaaaaggccgcgttgctggcgtttttccataggctccgcccccctgacgagcatcacaaaaatcgacgctcaagtcagaggtggcgaaacccgacaggactataaagataccaggcgtttccccctggaagctccctcgtgcgctctcctgttccgaccctgccgcttaccggatacctgtccgcctttctcccttcgggaagcgtggcgctttctcatagctcacgctgtaggtatctcagttcggtgtaggtcgttcgctccaagctgggctgtgtgcacgaaccccccgttcagcccgaccgctgcgccttatccggtaactatcgtcttgagtccaacccggtaagacacgacttatcgccactggcagcagccactggtaacaggattagcagagcgaggtatgtaggcggtgctacagagttcttgaagtggtggcctaactacggctacactagaagaacagtatttggtatctgcgctctgctgaagccagttaccttcggaaaaagagttggtagctcttgatccggcaaacaaaccaccgctggtagcggtggtttttttgtttgcaagcagcagattacgcgcagaaaaaaaggatctcaagaagatcctttgatcttttctacggggtctgacgctcagtggaacgaaaactcacgttaagggattttggtcatgagattatcaaaaaggatcttcacctagatccttttaaattaaaaatgaagttttaaatcaatctaaagtatatatgagtaaacttggtctgacagttaccaatgcttaatcagtgaggcacctatctcagcgatctgtctatttcgttcatccatagttgcctgactccccgtcgtgtagataactacgatacgggagcgcttaccatctggccccagtgctgcaatgataccgcgagacccacgctcaccggctccagatttatcagcaataaaccagccagccggaagggccgagcgcagaagtggtcctgcaactttatccgcctccattcagtctattaattgttgccgggaagctagagtaagtagttcgccagttaatagtttgcgcaacgttgttggcattgctacaggcatcgtggtgtcactctcgtcgtttggtatggcttcattcagctccggttcccaacgatcaaggcgagttacatgatcccccatgttgtgcaaaaaagcggttagctccttcggtcctccgatcgttgtcagaagtaagttggccgcagtgttatcactcatggttatggcagcactgcataattctcttactgtcatgccatccgtaagatgcttttctgtgactggtgagtactcaaccaagtcattctgagaatagtgtatgcggcgaccgagttgctcttgcccggcgtcaatacgggataatagtgtatcacatagcagaactttaaaagtgctcatcattggaaaacgttcttcggggcgaaaactctcaaggatcttaccgctgttgagatccagttcgatgtaacccactcgtgcacccaactgatcttcagcatcttttactttcaccagcgtttctgggtgagcaaaaacaggaaggcaaaatgccgcaaaaaagggaataagggcgacacggaaatgttgaatactcatactcttcctttttcaatgggtaataactgatataattaaattgaagctctaatttgtgagtttagtatacatgcatttacttataatacagttttttagttttgctggccgcatcttctcaaatatgcttcccagcctgcttttctgtaacgttcaccctctaccttagcatcccttccctttgcaaatagtcctcttccaacaataataatgtcagatcctgtagagaccacatcatccacggttctatactgttgacccaatgcgtctcccttgtcatctaaacccacaccgggtgtcataatcaaccaatcgtaaccttcatctcttccacccatgtctctttgagcaataaagccgataacaaaatctttgtcgctcttcgcaatgtcaacagtacccttagtatattctccagtagatagggagcccttgcatgacaattctgctaacatcaaaaggcctctaggttcctttgttacttcttctgccgcctgcttcaaaccgctaacaatacctgggcccaccacaccgtgtgcattcgtaatgtctgcccattctgctattctgtatacacccgcagagtactgcaatttgactgtattaccaatgtcagcaaattttctgtcttcg

SEQ ID NO: 166 - DNA, 7266 bp, Artificial Sequence
  OXC158-S367R(=CGG)
aagagtaaaaaattgtacttggcggataatgcctttagcggcttaactgtgccctccatggaaaaatcagtcaagatatccacatgtgtttttagtaaacaaattttgggacctaatgcttcaactaactccagtaattccttggtggtacgaacatccaatgaagcacacaagtttgtttgcttttcgtgcatgatattaaatagcttggcagcaacaggactaggatgagtagcagcacgttccttatatgtagctttcgacatgatttatcttcgtttcctgcaggtttttgttctgtgcagttgggttaagaatactgggcaatttcatgtttcttcaacactacatatgcgtatatataccaatctaagtctgtgctccttccttcgttcttccttctgttcggagattaccgaatcaaaaaaatttcaaagaaaccgaaatcaaaaaaaagaataaaaaaaaaatgatgaattgaattgaaaagctagcttatcgatgataagctgtcaaagatgagaattaattccacggactatagactatactagatactccgtctactgtacgatacacttccgctcaggtccttgtcctttaacgaggccttaccactcttttgttactctattgatccagctcagcaaaggcagtgtgatctaagattctatcttcgcgatgtagtaaaactagctagaccgagaaagagactagaaatgcaaaaggcacttctacaatggctgccatcattattatccgatgtgacgctgcagcttctcaatgatattcgaatacgctttgaggagatacagcctaatatccgacaaactgttttacagatttacgatcgtacttgttacccatcattgaattttgaacatccgaacctgggagttttccctgaaacagatagtatatttgaacctgtataataatatatagtctagcgctttacggaagacaatgtatgtatttcggttcctggagaaactattgcatctattgcataggtaatcttgcacgtcgcatccccggttcattttctgcgtttccatcttgcacttcaatagcatatctttgttcgcttgcctgtaacttacacgcgcctcgtatcttttaatgatggaataatttgggaatttactctgtgtttatttatttttatgttttgtatttggattttagaaagtaaataaagaaggtagaagagttacggaatgaagaaaaaaaaataaacaaaggtttaaaaaatttcaacaaaaagcgtactttacatatatatttattagacaagaaaagcagattaaatagatatacattcgattaacgataagtaaaatgtaaaatcacaggattttcgtgtgtggtcttctacacagacaagatgaaacaattcggcattaatacctgagagcaggaagagcaagataaaaggtagtatttgttggcgatccccctagagtcttttacatcttcggaaaacaaaaactattttttctttaatttctttttttactttctatttttaatttatatatttatattaaaaaatttaaattataattatttttatagcacgtgatgaaaaggaccgggaagctccaccccggttgataatcagaaaagccccaaaaacaggaagattgtataagcaaatatttaaattgtaaacgttaatattttgttaaaattcgcgttaaatttttgttaaatcagctcattttttaacgaatagcccgaaatcggcaaaatcccttataaatcaaaagaatagaccgagatagggttgagtgttgttccagtttccaacaagagtccactattaaagaacgtggactccaacgtcaaagggcgaaaaagggtctatcagggcgatggcccactacgtgaaccatcaccctaatcaagttttttggggtcgaggtgccgtaaagcagtaaatcggaagggtaaacggatgcccccatttagagcttgacggggaaagccggcgaacgtggcgagaaaggaagggaagaaagcgaaaggagcgggggctagggcggtgggaagtgtaggggtcacgctgggcgtaaccaccacacccgccgcgcttaatggggcgctacagggcgcgtggggatgatccactagtacggattagaagccgccgagcgggtgacagccctccgaaggaagactctcctccgtgcgtcctcgtcttcaccggtcgcgttcctgaaacgcagatgtgcctcgcgccgcactgctccgaacaataaagattctacaatactagcttttatggttatgaagaggaaaaattggcagtaacctggccccacaaaccttcaaatgaacgaatcaaattaacaaccataggatgataatgcgattagttttttagccttatttctggggtaattaatcagcgaagcgatgatttttgatctattaacagatatataaatgcaaaaactgcataaccactttaactaatactttcaacattttcggtttgtattacttcttattcaaatgtaataaaagtatcaacaaaaaattgttaatatacctctatactttaacgtcaaggagaaaaaaccccggatcggactactagcagctgtaatacgactcactatagggaatattaagcttaaacaatgaggcaggtttggttctcttggattgtgggattgttcctatgttttttcaacgtgtcttctgctgctccagtcaacactacaacagaagatgaaacggcacaaattccggctgaagctgtcatcggttactcagatttagaaggggatttcgatgttgctgttttgccattttccaacagcacaaataacgggttattgtttataaatactactattgccagcattgctgctaaagaagaaggggtatctctcgagaaaagagaggctgaagctatgccatgggaaaacttcttgaagtgcttctcccaatatatcccaaacaacgagactaacttaaagttagtttacactcaaaacaatccattatacatgtctgtcttaaactctactattcataacttaagatttacttccgatcggacccctaagccattggttatcgtcaccccatctcacgtctcccatatccaaggtactatcttatgttctaagaaggttggtttgcaaatccgtactagatctggtggtcacgactctgaaggtatgtcctatatctctcaagagccatttgtcattgttgacttaagaaatatgagatccattaaaattgatgttcattctcaaactgcttgggtcgaagctggtgccaccttgggtgaagtttactactgggtcaacgaaaaaaacgaaaacttatctttagctgccggttactgtccaaccgtctgtgctggtggtcatttcggtggtggtggttacggtccattgatgcgtaactacggtttagctgctgacaacattattgacgctcatttagttaatgttcacggtaaggttttggacagaaaatctatgggtgaagatttattttgggccttgagaggtggtggtgctgaatccttcggtatcatcgttgcctggaagattcgtttagttgctgtcccttctaagtccaccatgttctccgtcaagaaaatcatggaaattcatgagttggtcaaattggttaacaagtggcaaaacatcgcttacaagtatgacaaggatttgttgttaatgactcacttcatcacccgtaatatcaccgacaaccaaggtaagaacaaaactgctattcacacctacttctcctccgtttttttgggtggtgtcgactccttagtcgatttgatgaacaaatcctttccagaattgggtattaagaaaactgattgtagacaattgtcttggattgacaccattatcttctattctggtgtcgttaactacgacaccgacaactttaacaaggaaattttgttggatcgttctgctggtcaaaatatcgccttcaaaatcaaattggactacgtcaaaaagccaatcccagaacgggttttcgttcaaattttggaaaagttgtacgaagaagacattggtgtgggtatgtatgctttgtatccatatggtggtatcatggacgaaatttccgaatctgccatcccattcccacacagagctggtattttatatgaattgtggtacatctgttcttgggaaaagcaagaagacaacgaaaagcatttaaactggattagaaacatttacaacttcatgaccccatacgtttctaagaacccaagaggcgcctatttgaactaccgtgacttagatattggtattaatgacccaaagaacccaaacaactatactcaagccagaatttggggtgaaaagtacttcggtaagaacttcgatagattagttaaggttaaaactttggtcgatccaaacaacttcttcagaaacgaacaatccatcccaccattgccaagacatcgtcacggccatcatcaccatcaccattagctcgagcatgcatctagagggccgcatcatgtaattagttatgtcacgcttacattcacgccctccccccacatccgctctaaccgaaaaggaaggagttagacaacctgaagtctaggtccctatttatttttttatagttatgttagtattaagaacgttatttatatttcaaatttttcttttttttctgtacagacgcgtgtacgcatgtaacattatactgaaaaccttgcttgagaaggttttgggacgctcgaaggctttaatttgcggccctgcattaatgaatcggccaacgcgcggggagaggcggtttgcgtattgggcgctcttccgcttcctcgctcactgactcgctgcgctcggtcgttcggctgcggcgagcggtatcagctcactcaaaggcggtaatacggttatccacagaatcaggggataacgcaggaaagaacatgtgagcaaaaggccagcaaaagcccaggaaccgtaaaaaggccgcgttgctggcgtttttccataggctccgcccccctgacgagcatcacaaaaatcgacgctcaagtcagaggtggcgaaacccgacaggactataaagataccaggcgtttccccctggaagctccctcgtgcgctctcctgttccgaccctgccgcttaccggatacctgtccgcctttctcccttcgggaagcgtggcgctttctcatagctcacgctgtaggtatctcagttcggtgtaggtcgttcgctccaagctgggctgtgtgcacgaaccccccgttcagcccgaccgctgcgccttatccggtaactatcgtcttgagtccaacccggtaagacacgacttatcgccactggcagcagccactggtaacaggattagcagagcgaggtatgtaggcggtgctacagagttcttgaagtggtggcctaactacggctacactagaagaacagtatttggtatctgcgctctgctgaagccagttaccttcggaaaaagagttggtagctcttgatccggcaaacaaaccaccgctggtagcggtggtttttttgtttgcaagcagcagattacgcgcagaaaaaaaggatctcaagaagatcctttgatcttttctacggggtctgacgctcagtggaacgaaaactcacgttaagggattttggtcatgagattatcaaaaaggatcttcacctagatccttttaaattaaaaatgaagttttaaatcaatctaaagtatatatgagtaaacttggtctgacagttaccaatgcttaatcagtgaggcacctatctcagcgatctgtctatttcgttcatccatagttgcctgactccccgtcgtgtagataactacgatacgggagcgcttaccatctggccccagtgctgcaatgataccgcgagacccacgctcaccggctccagatttatcagcaataaaccagccagccggaagggccgagcgcagaagtggtcctgcaactttatccgcctccattcagtctattaattgttgccgggaagctagagtaagtagttcgccagttaatagtttgcgcaacgttgttggcattgctacaggcatcgtggtgtcactctcgtcgtttggtatggcttcattcagctccggttcccaacgatcaaggcgagttacatgatcccccatgttgtgcaaaaaagcggttagctccttcggtcctccgatcgttgtcagaagtaagttggccgcagtgttatcactcatggttatggcagcactgcataattctcttactgtcatgccatccgtaagatgcttttctgtgactggtgagtactcaaccaagtcattctgagaatagtgtatgcggcgaccgagttgctcttgcccggcgtcaatacgggataatagtgtatcacatagcagaactttaaaagtgctcatcattggaaaacgttcttcggggcgaaaactctcaaggatcttaccgctgttgagatccagttcgatgtaacccactcgtgcacccaactgatcttcagcatcttttactttcaccagcgtttctgggtgagcaaaaacaggaaggcaaaatgccgcaaaaaagggaataagggcgacacggaaatgttgaatactcatactcttcctttttcaatgggtaataactgatataattaaattgaagctctaatttgtgagtttagtatacatgcatttacttataatacagttttttagttttgctggccgcatcttctcaaatatgcttcccagcctgcttttctgtaacgttcaccctctaccttagcatcccttccctttgcaaatagtcctcttccaacaataataatgtcagatcctgtagagaccacatcatccacggttctatactgttgacccaatgcgtctcccttgtcatctaaacccacaccgggtgtcataatcaaccaatcgtaaccttcatctcttccacccatgtctctttgagcaataaagccgataacaaaatctttgtcgctcttcgcaatgtcaacagtacccttagtatattctccagtagatagggagcccttgcatgacaattctgctaacatcaaaaggcctctaggttcctttgttacttcttctgccgcctgcttcaaaccgctaacaatacctgggcccaccacaccgtgtgcattcgtaatgtctgcccattctgctattctgtatacacccgcagagtactgcaatttgactgtattaccaatgtcagcaaattttctgtcttcg

SEQ ID NO: 167 - DNA, 7266 bp, Artificial Sequence
  OXC158-Q274G
aagagtaaaaaattgtacttggcggataatgcctttagcggcttaactgtgccctccatggaaaaatcagtcaagatatccacatgtgtttttagtaaacaaattttgggacctaatgcttcaactaactccagtaattccttggtggtacgaacatccaatgaagcacacaagtttgtttgcttttcgtgcatgatattaaatagcttggcagcaacaggactaggatgagtagcagcacgttccttatatgtagctttcgacatgatttatcttcgtttcctgcaggtttttgttctgtgcagttgggttaagaatactgggcaatttcatgtttcttcaacactacatatgcgtatatataccaatctaagtctgtgctccttccttcgttcttccttctgttcggagattaccgaatcaaaaaaatttcaaagaaaccgaaatcaaaaaaaagaataaaaaaaaaatgatgaattgaattgaaaagctagcttatcgatgataagctgtcaaagatgagaattaattccacggactatagactatactagatactccgtctactgtacgatacacttccgctcaggtccttgtcctttaacgaggccttaccactcttttgttactctattgatccagctcagcaaaggcagtgtgatctaagattctatcttcgcgatgtagtaaaactagctagaccgagaaagagactagaaatgcaaaaggcacttctacaatggctgccatcattattatccgatgtgacgctgcagcttctcaatgatattcgaatacgctttgaggagatacagcctaatatccgacaaactgttttacagatttacgatcgtacttgttacccatcattgaattttgaacatccgaacctgggagttttccctgaaacagatagtatatttgaacctgtataataatatatagtctagcgctttacggaagacaatgtatgtatttcggttcctggagaaactattgcatctattgcataggtaatcttgcacgtcgcatccccggttcattttctgcgtttccatcttgcacttcaatagcatatctttgttcgcttgcctgtaacttacacgcgcctcgtatcttttaatgatggaataatttgggaatttactctgtgtttatttatttttatgttttgtatttggattttagaaagtaaataaagaaggtagaagagttacggaatgaagaaaaaaaaataaacaaaggtttaaaaaatttcaacaaaaagcgtactttacatatatatttattagacaagaaaagcagattaaatagatatacattcgattaacgataagtaaaatgtaaaatcacaggattttcgtgtgtggtcttctacacagacaagatgaaacaattcggcattaatacctgagagcaggaagagcaagataaaaggtagtatttgttggcgatccccctagagtcttttacatcttcggaaaacaaaaactattttttctttaatttctttttttactttctatttttaatttatatatttatattaaaaaatttaaattataattatttttatagcacgtgatgaaaaggaccgggaagctccaccccggttgataatcagaaaagccccaaaaacaggaagattgtataagcaaatatttaaattgtaaacgttaatattttgttaaaattcgcgttaaatttttgttaaatcagctcattttttaacgaatagcccgaaatcggcaaaatcccttataaatcaaaagaatagaccgagatagggttgagtgttgttccagtttccaacaagagtccactattaaagaacgtggactccaacgtcaaagggcgaaaaagggtctatcagggcgatggcccactacgtgaaccatcaccctaatcaagttttttggggtcgaggtgccgtaaagcagtaaatcggaagggtaaacggatgcccccatttagagcttgacggggaaagccggcgaacgtggcgagaaaggaagggaagaaagcgaaaggagcgggggctagggcggtgggaagtgtaggggtcacgctgggcgtaaccaccacacccgccgcgcttaatggggcgctacagggcgcgtggggatgatccactagtacggattagaagccgccgagcgggtgacagccctccgaaggaagactctcctccgtgcgtcctcgtcttcaccggtcgcgttcctgaaacgcagatgtgcctcgcgccgcactgctccgaacaataaagattctacaatactagcttttatggttatgaagaggaaaaattggcagtaacctggccccacaaaccttcaaatgaacgaatcaaattaacaaccataggatgataatgcgattagttttttagccttatttctggggtaattaatcagcgaagcgatgatttttgatctattaacagatatataaatgcaaaaactgcataaccactttaactaatactttcaacattttcggtttgtattacttcttattcaaatgtaataaaagtatcaacaaaaaattgttaatatacctctatactttaacgtcaaggagaaaaaaccccggatcggactactagcagctgtaatacgactcactatagggaatattaagcttaaacaatgaggcaggtttggttctcttggattgtgggattgttcctatgttttttcaacgtgtcttctgctgctccagtcaacactacaacagaagatgaaacggcacaaattccggctgaagctgtcatcggttactcagatttagaaggggatttcgatgttgctgttttgccattttccaacagcacaaataacgggttattgtttataaatactactattgccagcattgctgctaaagaagaaggggtatctctcgagaaaagagaggctgaagctatgccatgggaaaacttcttgaagtgcttctcccaatatatcccaaacaacgagactaacttaaagttagtttacactcaaaacaatccattatacatgtctgtcttaaactctactattcataacttaagatttacttccgatcggacccctaagccattggttatcgtcaccccatctcacgtctcccatatccaaggtactatcttatgttctaagaaggttggtttgcaaatccgtactagatctggtggtcacgactctgaaggtatgtcctatatctctcaagagccatttgtcattgttgacttaagaaatatgagatccattaaaattgatgttcattctcaaactgcttgggtcgaagctggtgccaccttgggtgaagtttactactgggtcaacgaaaaaaacgaaaacttatctttagctgccggttactgtccaaccgtctgtgctggtggtcatttcggtggtggtggttacggtccattgatgcgtaactacggtttagctgctgacaacattattgacgctcatttagttaatgttcacggtaaggttttggacagaaaatctatgggtgaagatttattttgggccttgagaggtggtggtgctgaatccttcggtatcatcgttgcctggaagattcgtttagttgctgtcccttctaagtccaccatgttctccgtcaagaaaatcatggaaattcatgagttggtcaaattggttaacaagtggcaaaacatcgcttacaagtatgacaaggatttgttgttaatgactcacttcatcacccgtaatatcaccgacaacgggggtaagaacaaaactgctattcacacctacttctcctccgtttttttgggtggtgtcgactccttagtcgatttgatgaacaaatcctttccagaattgggtattaagaaaactgattgtagacaattgtcttggattgacaccattatcttctattctggtgtcgttaactacgacaccgacaactttaacaaggaaattttgttggatcgttctgctggtcaaaatatcgccttcaaaatcaaattggactacgtcaaaaagccaatcccagaatctgttttcgttcaaattttggaaaagttgtacgaagaagacattggtgtgggtatgtatgctttgtatccatatggtggtatcatggacgaaatttccgaatctgccatcccattcccacacagagctggtattttatatgaattgtggtacatctgttcttgggaaaagcaagaagacaacgaaaagcatttaaactggattagaaacatttacaacttcatgaccccatacgtttctaagaacccaagaggcgcctatttgaactaccgtgacttagatattggtattaatgacccaaagaacccaaacaactatactcaagccagaatttggggtgaaaagtacttcggtaagaacttcgatagattagttaaggttaaaactttggtcgatccaaacaacttcttcagaaacgaacaatccatcccaccattgccaagacatcgtcacggccatcatcaccatcaccattagctcgagcatgcatctagagggccgcatcatgtaattagttatgtcacgcttacattcacgccctccccccacatccgctctaaccgaaaaggaaggagttagacaacctgaagtctaggtccctatttatttttttatagttatgttagtattaagaacgttatttatatttcaaatttttcttttttttctgtacagacgcgtgtacgcatgtaacattatactgaaaaccttgcttgagaaggttttgggacgctcgaaggctttaatttgcggccctgcattaatgaatcggccaacgcgcggggagaggcggtttgcgtattgggcgctcttccgcttcctcgctcactgactcgctgcgctcggtcgttcggctgcggcgagcggtatcagctcactcaaaggcggtaatacggttatccacagaatcaggggataacgcaggaaagaacatgtgagcaaaaggccagcaaaagcccaggaaccgtaaaaaggccgcgttgctggcgtttttccataggctccgcccccctgacgagcatcacaaaaatcgacgctcaagtcagaggtggcgaaacccgacaggactataaagataccaggcgtttccccctggaagctccctcgtgcgctctcctgttccgaccctgccgcttaccggatacctgtccgcctttctcccttcgggaagcgtggcgctttctcatagctcacgctgtaggtatctcagttcggtgtaggtcgttcgctccaagctgggctgtgtgcacgaaccccccgttcagcccgaccgctgcgccttatccggtaactatcgtcttgagtccaacccggtaagacacgacttatcgccactggcagcagccactggtaacaggattagcagagcgaggtatgtaggcggtgctacagagttcttgaagtggtggcctaactacggctacactagaagaacagtatttggtatctgcgctctgctgaagccagttaccttcggaaaaagagttggtagctcttgatccggcaaacaaaccaccgctggtagcggtggtttttttgtttgcaagcagcagattacgcgcagaaaaaaaggatctcaagaagatcctttgatcttttctacggggtctgacgctcagtggaacgaaaactcacgttaagggattttggtcatgagattatcaaaaaggatcttcacctagatccttttaaattaaaaatgaagttttaaatcaatctaaagtatatatgagtaaacttggtctgacagttaccaatgcttaatcagtgaggcacctatctcagcgatctgtctatttcgttcatccatagttgcctgactccccgtcgtgtagataactacgatacgggagcgcttaccatctggccccagtgctgcaatgataccgcgagacccacgctcaccggctccagatttatcagcaataaaccagccagccggaagggccgagcgcagaagtggtcctgcaactttatccgcctccattcagtctattaattgttgccgggaagctagagtaagtagttcgccagttaatagtttgcgcaacgttgttggcattgctacaggcatcgtggtgtcactctcgtcgtttggtatggcttcattcagctccggttcccaacgatcaaggcgagttacatgatcccccatgttgtgcaaaaaagcggttagctccttcggtcctccgatcgttgtcagaagtaagttggccgcagtgttatcactcatggttatggcagcactgcataattctcttactgtcatgccatccgtaagatgcttttctgtgactggtgagtactcaaccaagtcattctgagaatagtgtatgcggcgaccgagttgctcttgcccggcgtcaatacgggataatagtgtatcacatagcagaactttaaaagtgctcatcattggaaaacgttcttcggggcgaaaactctcaaggatcttaccgctgttgagatccagttcgatgtaacccactcgtgcacccaactgatcttcagcatcttttactttcaccagcgtttctgggtgagcaaaaacaggaaggcaaaatgccgcaaaaaagggaataagggcgacacggaaatgttgaatactcatactcttcctttttcaatgggtaataactgatataattaaattgaagctctaatttgtgagtttagtatacatgcatttacttataatacagttttttagttttgctggccgcatcttctcaaatatgcttcccagcctgcttttctgtaacgttcaccctctaccttagcatcccttccctttgcaaatagtcctcttccaacaataataatgtcagatcctgtagagaccacatcatccacggttctatactgttgacccaatgcgtctcccttgtcatctaaacccacaccgggtgtcataatcaaccaatcgtaaccttcatctcttccacccatgtctctttgagcaataaagccgataacaaaatctttgtcgctcttcgcaatgtcaacagtacccttagtatattctccagtagatagggagcccttgcatgacaattctgctaacatcaaaaggcctctaggttcctttgttacttcttctgccgcctgcttcaaaccgctaacaatacctgggcccaccacaccgtgtgcattcgtaatgtctgcccattctgctattctgtatacacccgcagagtactgcaatttgactgtattaccaatgtcagcaaattttctgtcttcg

SEQ ID NO: 168 - DNA, 7266 bp, Artificial Sequence
  OXC158-I351M
aagagtaaaaaattgtacttggcggataatgcctttagcggcttaactgtgccctccatggaaaaatcagtcaagatatccacatgtgtttttagtaaacaaattttgggacctaatgcttcaactaactccagtaattccttggtggtacgaacatccaatgaagcacacaagtttgtttgcttttcgtgcatgatattaaatagcttggcagcaacaggactaggatgagtagcagcacgttccttatatgtagctttcgacatgatttatcttcgtttcctgcaggtttttgttctgtgcagttgggttaagaatactgggcaatttcatgtttcttcaacactacatatgcgtatatataccaatctaagtctgtgctccttccttcgttcttccttctgttcggagattaccgaatcaaaaaaatttcaaagaaaccgaaatcaaaaaaaagaataaaaaaaaaatgatgaattgaattgaaaagctagcttatcgatgataagctgtcaaagatgagaattaattccacggactatagactatactagatactccgtctactgtacgatacacttccgctcaggtccttgtcctttaacgaggccttaccactcttttgttactctattgatccagctcagcaaaggcagtgtgatctaagattctatcttcgcgatgtagtaaaactagctagaccgagaaagagactagaaatgcaaaaggcacttctacaatggctgccatcattattatccgatgtgacgctgcagcttctcaatgatattcgaatacgctttgaggagatacagcctaatatccgacaaactgttttacagatttacgatcgtacttgttacccatcattgaattttgaacatccgaacctgggagttttccctgaaacagatagtatatttgaacctgtataataatatatagtctagcgctttacggaagacaatgtatgtatttcggttcctggagaaactattgcatctattgcataggtaatcttgcacgtcgcatccccggttcattttctgcgtttccatcttgcacttcaatagcatatctttgttcgcttgcctgtaacttacacgcgcctcgtatcttttaatgatggaataatttgggaatttactctgtgtttatttatttttatgttttgtatttggattttagaaagtaaataaagaaggtagaagagttacggaatgaagaaaaaaaaataaacaaaggtttaaaaaatttcaacaaaaagcgtactttacatatatatttattagacaagaaaagcagattaaatagatatacattcgattaacgataagtaaaatgtaaaatcacaggattttcgtgtgtggtcttctacacagacaagatgaaacaattcggcattaatacctgagagcaggaagagcaagataaaaggtagtatttgttggcgatccccctagagtcttttacatcttcggaaaacaaaaactattttttctttaatttctttttttactttctatttttaatttatatatttatattaaaaaatttaaattataattatttttatagcacgtgatgaaaaggaccgggaagctccaccccggttgataatcagaaaagccccaaaaacaggaagattgtataagcaaatatttaaattgtaaacgttaatattttgttaaaattcgcgttaaatttttgttaaatcagctcattttttaacgaatagcccgaaatcggcaaaatcccttataaatcaaaagaatagaccgagatagggttgagtgttgttccagtttccaacaagagtccactattaaagaacgtggactccaacgtcaaagggcgaaaaagggtctatcagggcgatggcccactacgtgaaccatcaccctaatcaagttttttggggtcgaggtgccgtaaagcagtaaatcggaagggtaaacggatgcccccatttagagcttgacggggaaagccggcgaacgtggcgagaaaggaagggaagaaagcgaaaggagcgggggctagggcggtgggaagtgtaggggtcacgctgggcgtaaccaccacacccgccgcgcttaatggggcgctacagggcgcgtggggatgatccactagtacggattagaagccgccgagcgggtgacagccctccgaaggaagactctcctccgtgcgtcctcgtcttcaccggtcgcgttcctgaaacgcagatgtgcctcgcgccgcactgctccgaacaataaagattctacaatactagcttttatggttatgaagaggaaaaattggcagtaacctggccccacaaaccttcaaatgaacgaatcaaattaacaaccataggatgataatgcgattagttttttagccttatttctggggtaattaatcagcgaagcgatgatttttgatctattaacagatatataaatgcaaaaactgcataaccactttaactaatactttcaacattttcggtttgtattacttcttattcaaatgtaataaaagtatcaacaaaaaattgttaatatacctctatactttaacgtcaaggagaaaaaaccccggatcggactactagcagctgtaatacgactcactatagggaatattaagcttaaacaatgaggcaggtttggttctcttggattgtgggattgttcctatgttttttcaacgtgtcttctgctgctccagtcaacactacaacagaagatgaaacggcacaaattccggctgaagctgtcatcggttactcagatttagaaggggatttcgatgttgctgttttgccattttccaacagcacaaataacgggttattgtttataaatactactattgccagcattgctgctaaagaagaaggggtatctctcgagaaaagagaggctgaagctatgccatgggaaaacttcttgaagtgcttctcccaatatatcccaaacaacgagactaacttaaagttagtttacactcaaaacaatccattatacatgtctgtcttaaactctactattcataacttaagatttacttccgatcggacccctaagccattggttatcgtcaccccatctcacgtctcccatatccaaggtactatcttatgttctaagaaggttggtttgcaaatccgtactagatctggtggtcacgactctgaaggtatgtcctatatctctcaagagccatttgtcattgttgacttaagaaatatgagatccattaaaattgatgttcattctcaaactgcttgggtcgaagctggtgccaccttgggtgaagtttactactgggtcaacgaaaaaaacgaaaacttatctttagctgccggttactgtccaaccgtctgtgctggtggtcatttcggtggtggtggttacggtccattgatgcgtaactacggtttagctgctgacaacattattgacgctcatttagttaatgttcacggtaaggttttggacagaaaatctatgggtgaagatttattttgggccttgagaggtggtggtgctgaatccttcggtatcatcgttgcctggaagattcgtttagttgctgtcccttctaagtccaccatgttctccgtcaagaaaatcatggaaattcatgagttggtcaaattggttaacaagtggcaaaacatcgcttacaagtatgacaaggatttgttgttaatgactcacttcatcacccgtaatatcaccgacaaccaaggtaagaacaaaactgctattcacacctacttctcctccgtttttttgggtggtgtcgactccttagtcgatttgatgaacaaatcctttccagaattgggtattaagaaaactgattgtagacaattgtcttggattgacaccattatcttctattctggtgtcgttaactacgacaccgacaactttaacaaggaaattttgttggatcgttctgctggtcaaaatatggccttcaaaatcaaattggactacgtcaaaaagccaatcccagaatctgttttcgttcaaattttggaaaagttgtacgaagaagacattggtgtgggtatgtatgctttgtatccatatggtggtatcatggacgaaatttccgaatctgccatcccattcccacacagagctggtattttatatgaattgtggtacatctgttcttgggaaaagcaagaagacaacgaaaagcatttaaactggattagaaacatttacaacttcatgaccccatacgtttctaagaacccaagaggcgcctatttgaactaccgtgacttagatattggtattaatgacccaaagaacccaaacaactatactcaagccagaatttggggtgaaaagtacttcggtaagaacttcgatagattagttaaggttaaaactttggtcgatccaaacaacttcttcagaaacgaacaatccatcccaccattgccaagacatcgtcacggccatcatcaccatcaccattagctcgagcatgcatctagagggccgcatcatgtaattagttatgtcacgcttacattcacgccctccccccacatccgctctaaccgaaaaggaaggagttagacaacctgaagtctaggtccctatttatttttttatagttatgttagtattaagaacgttatttatatttcaaatttttcttttttttctgtacagacgcgtgtacgcatgtaacattatactgaaaaccttgcttgagaaggttttgggacgctcgaaggctttaatttgcggccctgcattaatgaatcggccaacgcgcggggagaggcggtttgcgtattgggcgctcttccgcttcctcgctcactgactcgctgcgctcggtcgttcggctgcggcgagcggtatcagctcactcaaaggcggtaatacggttatccacagaatcaggggataacgcaggaaagaacatgtgagcaaaaggccagcaaaagcccaggaaccgtaaaaaggccgcgttgctggcgtttttccataggctccgcccccctgacgagcatcacaaaaatcgacgctcaagtcagaggtggcgaaacccgacaggactataaagataccaggcgtttccccctggaagctccctcgtgcgctctcctgttccgaccctgccgcttaccggatacctgtccgcctttctcccttcgggaagcgtggcgctttctcatagctcacgctgtaggtatctcagttcggtgtaggtcgttcgctccaagctgggctgtgtgcacgaaccccccgttcagcccgaccgctgcgccttatccggtaactatcgtcttgagtccaacccggtaagacacgacttatcgccactggcagcagccactggtaacaggattagcagagcgaggtatgtaggcggtgctacagagttcttgaagtggtggcctaactacggctacactagaagaacagtatttggtatctgcgctctgctgaagccagttaccttcggaaaaagagttggtagctcttgatccggcaaacaaaccaccgctggtagcggtggtttttttgtttgcaagcagcagattacgcgcagaaaaaaaggatctcaagaagatcctttgatcttttctacggggtctgacgctcagtggaacgaaaactcacgttaagggattttggtcatgagattatcaaaaaggatcttcacctagatccttttaaattaaaaatgaagttttaaatcaatctaaagtatatatgagtaaacttggtctgacagttaccaatgcttaatcagtgaggcacctatctcagcgatctgtctatttcgttcatccatagttgcctgactccccgtcgtgtagataactacgatacgggagcgcttaccatctggccccagtgctgcaatgataccgcgagacccacgctcaccggctccagatttatcagcaataaaccagccagccggaagggccgagcgcagaagtggtcctgcaactttatccgcctccattcagtctattaattgttgccgggaagctagagtaagtagttcgccagttaatagtttgcgcaacgttgttggcattgctacaggcatcgtggtgtcactctcgtcgtttggtatggcttcattcagctccggttcccaacgatcaaggcgagttacatgatcccccatgttgtgcaaaaaagcggttagctccttcggtcctccgatcgttgtcagaagtaagttggccgcagtgttatcactcatggttatggcagcactgcataattctcttactgtcatgccatccgtaagatgcttttctgtgactggtgagtactcaaccaagtcattctgagaatagtgtatgcggcgaccgagttgctcttgcccggcgtcaatacgggataatagtgtatcacatagcagaactttaaaagtgctcatcattggaaaacgttcttcggggcgaaaactctcaaggatcttaccgctgttgagatccagttcgatgtaacccactcgtgcacccaactgatcttcagcatcttttactttcaccagcgtttctgggtgagcaaaaacaggaaggcaaaatgccgcaaaaaagggaataagggcgacacggaaatgttgaatactcatactcttcctttttcaatgggtaataactgatataattaaattgaagctctaatttgtgagtttagtatacatgcatttacttataatacagttttttagttttgctggccgcatcttctcaaatatgcttcccagcctgcttttctgtaacgttcaccctctaccttagcatcccttccctttgcaaatagtcctcttccaacaataataatgtcagatcctgtagagaccacatcatccacggttctatactgttgacccaatgcgtctcccttgtcatctaaacccacaccgggtgtcataatcaaccaatcgtaaccttcatctcttccacccatgtctctttgagcaataaagccgataacaaaatctttgtcgctcttcgcaatgtcaacagtacccttagtatattctccagtagatagggagcccttgcatgacaattctgctaacatcaaaaggcctctaggttcctttgttacttcttctgccgcctgcttcaaaccgctaacaatacctgggcccaccacaccgtgtgcattcgtaatgtctgcccattctgctattctgtatacacccgcagagtactgcaatttgactgtattaccaatgtcagcaaattttctgtcttcg

SEQ ID NO: 169 - DNA, 7266 bp, Artificial Sequence
  OXC158-V383A
aagagtaaaaaattgtacttggcggataatgcctttagcggcttaactgtgccctccatggaaaaatcagtcaagatatccacatgtgtttttagtaaacaaattttgggacctaatgcttcaactaactccagtaattccttggtggtacgaacatccaatgaagcacacaagtttgtttgcttttcgtgcatgatattaaatagcttggcagcaacaggactaggatgagtagcagcacgttccttatatgtagctttcgacatgatttatcttcgtttcctgcaggtttttgttctgtgcagttgggttaagaatactgggcaatttcatgtttcttcaacactacatatgcgtatatataccaatctaagtctgtgctccttccttcgttcttccttctgttcggagattaccgaatcaaaaaaatttcaaagaaaccgaaatcaaaaaaaagaataaaaaaaaaatgatgaattgaattgaaaagctagcttatcgatgataagctgtcaaagatgagaattaattccacggactatagactatactagatactccgtctactgtacgatacacttccgctcaggtccttgtcctttaacgaggccttaccactcttttgttactctattgatccagctcagcaaaggcagtgtgatctaagattctatcttcgcgatgtagtaaaactagctagaccgagaaagagactagaaatgcaaaaggcacttctacaatggctgccatcattattatccgatgtgacgctgcagcttctcaatgatattcgaatacgctttgaggagatacagcctaatatccgacaaactgttttacagatttacgatcgtacttgttacccatcattgaattttgaacatccgaacctgggagttttccctgaaacagatagtatatttgaacctgtataataatatatagtctagcgctttacggaagacaatgtatgtatttcggttcctggagaaactattgcatctattgcataggtaatcttgcacgtcgcatccccggttcattttctgcgtttccatcttgcacttcaatagcatatctttgttcgcttgcctgtaacttacacgcgcctcgtatcttttaatgatggaataatttgggaatttactctgtgtttatttatttttatgttttgtatttggattttagaaagtaaataaagaaggtagaagagttacggaatgaagaaaaaaaaataaacaaaggtttaaaaaatttcaacaaaaagcgtactttacatatatatttattagacaagaaaagcagattaaatagatatacattcgattaacgataagtaaaatgtaaaatcacaggattttcgtgtgtggtcttctacacagacaagatgaaacaattcggcattaatacctgagagcaggaagagcaagataaaaggtagtatttgttggcgatccccctagagtcttttacatcttcggaaaacaaaaactattttttctttaatttctttttttactttctatttttaatttatatatttatattaaaaaatttaaattataattatttttatagcacgtgatgaaaaggaccgggaagctccaccccggttgataatcagaaaagccccaaaaacaggaagattgtataagcaaatatttaaattgtaaacgttaatattttgttaaaattcgcgttaaatttttgttaaatcagctcattttttaacgaatagcccgaaatcggcaaaatcccttataaatcaaaagaatagaccgagatagggttgagtgttgttccagtttccaacaagagtccactattaaagaacgtggactccaacgtcaaagggcgaaaaagggtctatcagggcgatggcccactacgtgaaccatcaccctaatcaagttttttggggtcgaggtgccgtaaagcagtaaatcggaagggtaaacggatgcccccatttagagcttgacggggaaagccggcgaacgtggcgagaaaggaagggaagaaagcgaaaggagcgggggctagggcggtgggaagtgtaggggtcacgctgggcgtaaccaccacacccgccgcgcttaatggggcgctacagggcgcgtggggatgatccactagtacggattagaagccgccgagcgggtgacagccctccgaaggaagactctcctccgtgcgtcctcgtcttcaccggtcgcgttcctgaaacgcagatgtgcctcgcgccgcactgctccgaacaataaagattctacaatactagcttttatggttatgaagaggaaaaattggcagtaacctggccccacaaaccttcaaatgaacgaatcaaattaacaaccataggatgataatgcgattagttttttagccttatttctggggtaattaatcagcgaagcgatgatttttgatctattaacagatatataaatgcaaaaactgcataaccactttaactaatactttcaacattttcggtttgtattacttcttattcaaatgtaataaaagtatcaacaaaaaattgttaatatacctctatactttaacgtcaaggagaaaaaaccccggatcggactactagcagctgtaatacgactcactatagggaatattaagcttaaacaatgaggcaggtttggttctcttggattgtgggattgttcctatgttttttcaacgtgtcttctgctgctccagtcaacactacaacagaagatgaaacggcacaaattccggctgaagctgtcatcggttactcagatttagaaggggatttcgatgttgctgttttgccattttccaacagcacaaataacgggttattgtttataaatactactattgccagcattgctgctaaagaagaaggggtatctctcgagaaaagagaggctgaagctatgccatgggaaaacttcttgaagtgcttctcccaatatatcccaaacaacgagactaacttaaagttagtttacactcaaaacaatccattatacatgtctgtcttaaactctactattcataacttaagatttacttccgatcggacccctaagccattggttatcgtcaccccatctcacgtctcccatatccaaggtactatcttatgttctaagaaggttggtttgcaaatccgtactagatctggtggtcacgactctgaaggtatgtcctatatctctcaagagccatttgtcattgttgacttaagaaatatgagatccattaaaattgatgttcattctcaaactgcttgggtcgaagctggtgccaccttgggtgaagtttactactgggtcaacgaaaaaaacgaaaacttatctttagctgccggttactgtccaaccgtctgtgctggtggtcatttcggtggtggtggttacggtccattgatgcgtaactacggtttagctgctgacaacattattgacgctcatttagttaatgttcacggtaaggttttggacagaaaatctatgggtgaagatttattttgggccttgagaggtggtggtgctgaatccttcggtatcatcgttgcctggaagattcgtttagttgctgtcccttctaagtccaccatgttctccgtcaagaaaatcatggaaattcatgagttggtcaaattggttaacaagtggcaaaacatcgcttacaagtatgacaaggatttgttgttaatgactcacttcatcacccgtaatatcaccgacaaccaaggtaagaacaaaactgctattcacacctacttctcctccgtttttttgggtggtgtcgactccttagtcgatttgatgaacaaatcctttccagaattgggtattaagaaaactgattgtagacaattgtcttggattgacaccattatcttctattctggtgtcgttaactacgacaccgacaactttaacaaggaaattttgttggatcgttctgctggtcaaaatatcgccttcaaaatcaaattggactacgtcaaaaagccaatcccagaatctgttttcgttcaaattttggaaaagttgtacgaagaagacattggtgcgggtatgtatgctttgtatccatatggtggtatcatggacgaaatttccgaatctgccatcccattcccacacagagctggtattttatatgaattgtggtacatctgttcttgggaaaagcaagaagacaacgaaaagcatttaaactggattagaaacatttacaacttcatgaccccatacgtttctaagaacccaagaggcgcctatttgaactaccgtgacttagatattggtattaatgacccaaagaacccaaacaactatactcaagccagaatttggggtgaaaagtacttcggtaagaacttcgatagattagttaaggttaaaactttggtcgatccaaacaacttcttcagaaacgaacaatccatcccaccattgccaagacatcgtcacggccatcatcaccatcaccattagctcgagcatgcatctagagggccgcatcatgtaattagttatgtcacgcttacattcacgccctccccccacatccgctctaaccgaaaaggaaggagttagacaacctgaagtctaggtccctatttatttttttatagttatgttagtattaagaacgttatttatatttcaaatttttcttttttttctgtacagacgcgtgtacgcatgtaacattatactgaaaaccttgcttgagaaggttttgggacgctcgaaggctttaatttgcggccctgcattaatgaatcggccaacgcgcggggagaggcggtttgcgtattgggcgctcttccgcttcctcgctcactgactcgctgcgctcggtcgttcggctgcggcgagcggtatcagctcactcaaaggcggtaatacggttatccacagaatcaggggataacgcaggaaagaacatgtgagcaaaaggccagcaaaagcccaggaaccgtaaaaaggccgcgttgctggcgtttttccataggctccgcccccctgacgagcatcacaaaaatcgacgctcaagtcagaggtggcgaaacccgacaggactataaagataccaggcgtttccccctggaagctccctcgtgcgctctcctgttccgaccctgccgcttaccggatacctgtccgcctttctcccttcgggaagcgtggcgctttctcatagctcacgctgtaggtatctcagttcggtgtaggtcgttcgctccaagctgggctgtgtgcacgaaccccccgttcagcccgaccgctgcgccttatccggtaactatcgtcttgagtccaacccggtaagacacgacttatcgccactggcagcagccactggtaacaggattagcagagcgaggtatgtaggcggtgctacagagttcttgaagtggtggcctaactacggctacactagaagaacagtatttggtatctgcgctctgctgaagccagttaccttcggaaaaagagttggtagctcttgatccggcaaacaaaccaccgctggtagcggtggtttttttgtttgcaagcagcagattacgcgcagaaaaaaaggatctcaagaagatcctttgatcttttctacggggtctgacgctcagtggaacgaaaactcacgttaagggattttggtcatgagattatcaaaaaggatcttcacctagatccttttaaattaaaaatgaagttttaaatcaatctaaagtatatatgagtaaacttggtctgacagttaccaatgcttaatcagtgaggcacctatctcagcgatctgtctatttcgttcatccatagttgcctgactccccgtcgtgtagataactacgatacgggagcgcttaccatctggccccagtgctgcaatgataccgcgagacccacgctcaccggctccagatttatcagcaataaaccagccagccggaagggccgagcgcagaagtggtcctgcaactttatccgcctccattcagtctattaattgttgccgggaagctagagtaagtagttcgccagttaatagtttgcgcaacgttgttggcattgctacaggcatcgtggtgtcactctcgtcgtttggtatggcttcattcagctccggttcccaacgatcaaggcgagttacatgatcccccatgttgtgcaaaaaagcggttagctccttcggtcctccgatcgttgtcagaagtaagttggccgcagtgttatcactcatggttatggcagcactgcataattctcttactgtcatgccatccgtaagatgcttttctgtgactggtgagtactcaaccaagtcattctgagaatagtgtatgcggcgaccgagttgctcttgcccggcgtcaatacgggataatagtgtatcacatagcagaactttaaaagtgctcatcattggaaaacgttcttcggggcgaaaactctcaaggatcttaccgctgttgagatccagttcgatgtaacccactcgtgcacccaactgatcttcagcatcttttactttcaccagcgtttctgggtgagcaaaaacaggaaggcaaaatgccgcaaaaaagggaataagggcgacacggaaatgttgaatactcatactcttcctttttcaatgggtaataactgatataattaaattgaagctctaatttgtgagtttagtatacatgcatttacttataatacagttttttagttttgctggccgcatcttctcaaatatgcttcccagcctgcttttctgtaacgttcaccctctaccttagcatcccttccctttgcaaatagtcctcttccaacaataataatgtcagatcctgtagagaccacatcatccacggttctatactgttgacccaatgcgtctcccttgtcatctaaacccacaccgggtgtcataatcaaccaatcgtaaccttcatctcttccacccatgtctctttgagcaataaagccgataacaaaatctttgtcgctcttcgcaatgtcaacagtacccttagtatattctccagtagatagggagcccttgcatgacaattctgctaacatcaaaaggcctctaggttcctttgttacttcttctgccgcctgcttcaaaccgctaacaatacctgggcccaccacaccgtgtgcattcgtaatgtctgcccattctgctattctgtatacacccgcagagtactgcaatttgactgtattaccaatgtcagcaaattttctgtcttcg

SEQ ID NO: 170 - DNA, 7266 bp, Artificial Sequence
  OXC158-S367Q
aagagtaaaaaattgtacttggcggataatgcctttagcggcttaactgtgccctccatggaaaaatcagtcaagatatccacatgtgtttttagtaaacaaattttgggacctaatgcttcaactaactccagtaattccttggtggtacgaacatccaatgaagcacacaagtttgtttgcttttcgtgcatgatattaaatagcttggcagcaacaggactaggatgagtagcagcacgttccttatatgtagctttcgacatgatttatcttcgtttcctgcaggtttttgttctgtgcagttgggttaagaatactgggcaatttcatgtttcttcaacactacatatgcgtatatataccaatctaagtctgtgctccttccttcgttcttccttctgttcggagattaccgaatcaaaaaaatttcaaagaaaccgaaatcaaaaaaaagaataaaaaaaaaatgatgaattgaattgaaaagctagcttatcgatgataagctgtcaaagatgagaattaattccacggactatagactatactagatactccgtctactgtacgatacacttccgctcaggtccttgtcctttaacgaggccttaccactcttttgttactctattgatccagctcagcaaaggcagtgtgatctaagattctatcttcgcgatgtagtaaaactagctagaccgagaaagagactagaaatgcaaaaggcacttctacaatggctgccatcattattatccgatgtgacgctgcagcttctcaatgatattcgaatacgctttgaggagatacagcctaatatccgacaaactgttttacagatttacgatcgtacttgttacccatcattgaattttgaacatccgaacctgggagttttccctgaaacagatagtatatttgaacctgtataataatatatagtctagcgctttacggaagacaatgtatgtatttcggttcctggagaaactattgcatctattgcataggtaatcttgcacgtcgcatccccggttcattttctgcgtttccatcttgcacttcaatagcatatctttgttcgcttgcctgtaacttacacgcgcctcgtatcttttaatgatggaataatttgggaatttactctgtgtttatttatttttatgttttgtatttggattttagaaagtaaataaagaaggtagaagagttacggaatgaagaaaaaaaaataaacaaaggtttaaaaaatttcaacaaaaagcgtactttacatatatatttattagacaagaaaagcagattaaatagatatacattcgattaacgataagtaaaatgtaaaatcacaggattttcgtgtgtggtcttctacacagacaagatgaaacaattcggcattaatacctgagagcaggaagagcaagataaaaggtagtatttgttggcgatccccctagagtcttttacatcttcggaaaacaaaaactattttttctttaatttctttttttactttctatttttaatttatatatttatattaaaaaatttaaattataattatttttatagcacgtgatgaaaaggaccgggaagctccaccccggttgataatcagaaaagccccaaaaacaggaagattgtataagcaaatatttaaattgtaaacgttaatattttgttaaaattcgcgttaaatttttgttaaatcagctcattttttaacgaatagcccgaaatcggcaaaatcccttataaatcaaaagaatagaccgagatagggttgagtgttgttccagtttccaacaagagtccactattaaagaacgtggactccaacgtcaaagggcgaaaaagggtctatcagggcgatggcccactacgtgaaccatcaccctaatcaagttttttggggtcgaggtgccgtaaagcagtaaatcggaagggtaaacggatgcccccatttagagcttgacggggaaagccggcgaacgtggcgagaaaggaagggaagaaagcgaaaggagcgggggctagggcggtgggaagtgtaggggtcacgctgggcgtaaccaccacacccgccgcgcttaatggggcgctacagggcgcgtggggatgatccactagtacggattagaagccgccgagcgggtgacagccctccgaaggaagactctcctccgtgcgtcctcgtcttcaccggtcgcgttcctgaaacgcagatgtgcctcgcgccgcactgctccgaacaataaagattctacaatactagcttttatggttatgaagaggaaaaattggcagtaacctggccccacaaaccttcaaatgaacgaatcaaattaacaaccataggatgataatgcgattagttttttagccttatttctggggtaattaatcagcgaagcgatgatttttgatctattaacagatatataaatgcaaaaactgcataaccactttaactaatactttcaacattttcggtttgtattacttcttattcaaatgtaataaaagtatcaacaaaaaattgttaatatacctctatactttaacgtcaaggagaaaaaaccccggatcggactactagcagctgtaatacgactcactatagggaatattaagcttaaacaatgaggcaggtttggttctcttggattgtgggattgttcctatgttttttcaacgtgtcttctgctgctccagtcaacactacaacagaagatgaaacggcacaaattccggctgaagctgtcatcggttactcagatttagaaggggatttcgatgttgctgttttgccattttccaacagcacaaataacgggttattgtttataaatactactattgccagcattgctgctaaagaagaaggggtatctctcgagaaaagagaggctgaagctatgccatgggaaaacttcttgaagtgcttctcccaatatatcccaaacaacgagactaacttaaagttagtttacactcaaaacaatccattatacatgtctgtcttaaactctactattcataacttaagatttacttccgatcggacccctaagccattggttatcgtcaccccatctcacgtctcccatatccaaggtactatcttatgttctaagaaggttggtttgcaaatccgtactagatctggtggtcacgactctgaaggtatgtcctatatctctcaagagccatttgtcattgttgacttaagaaatatgagatccattaaaattgatgttcattctcaaactgcttgggtcgaagctggtgccaccttgggtgaagtttactactgggtcaacgaaaaaaacgaaaacttatctttagctgccggttactgtccaaccgtctgtgctggtggtcatttcggtggtggtggttacggtccattgatgcgtaactacggtttagctgctgacaacattattgacgctcatttagttaatgttcacggtaaggttttggacagaaaatctatgggtgaagatttattttgggccttgagaggtggtggtgctgaatccttcggtatcatcgttgcctggaagattcgtttagttgctgtcccttctaagtccaccatgttctccgtcaagaaaatcatggaaattcatgagttggtcaaattggttaacaagtggcaaaacatcgcttacaagtatgacaaggatttgttgttaatgactcacttcatcacccgtaatatcaccgacaaccaaggtaagaacaaaactgctattcacacctacttctcctccgtttttttgggtggtgtcgactccttagtcgatttgatgaacaaatcctttccagaattgggtattaagaaaactgattgtagacaattgtcttggattgacaccattatcttctattctggtgtcgttaactacgacaccgacaactttaacaaggaaattttgttggatcgttctgctggtcaaaatatcgccttcaaaatcaaattggactacgtcaaaaagccaatcccagaacaggttttcgttcaaattttggaaaagttgtacgaagaagacattggtgtgggtatgtatgctttgtatccatatggtggtatcatggacgaaatttccgaatctgccatcccattcccacacagagctggtattttatatgaattgtggtacatctgttcttgggaaaagcaagaagacaacgaaaagcatttaaactggattagaaacatttacaacttcatgaccccatacgtttctaagaacccaagaggcgcctatttgaactaccgtgacttagatattggtattaatgacccaaagaacccaaacaactatactcaagccagaatttggggtgaaaagtacttcggtaagaacttcgatagattagttaaggttaaaactttggtcgatccaaacaacttcttcagaaacgaacaatccatcccaccattgccaagacatcgtcacggccatcatcaccatcaccattagctcgagcatgcatctagagggccgcatcatgtaattagttatgtcacgcttacattcacgccctccccccacatccgctctaaccgaaaaggaaggagttagacaacctgaagtctaggtccctatttatttttttatagttatgttagtattaagaacgttatttatatttcaaatttttcttttttttctgtacagacgcgtgtacgcatgtaacattatactgaaaaccttgcttgagaaggttttgggacgctcgaaggctttaatttgcggccctgcattaatgaatcggccaacgcgcggggagaggcggtttgcgtattgggcgctcttccgcttcctcgctcactgactcgctgcgctcggtcgttcggctgcggcgagcggtatcagctcactcaaaggcggtaatacggttatccacagaatcaggggataacgcaggaaagaacatgtgagcaaaaggccagcaaaagcccaggaaccgtaaaaaggccgcgttgctggcgtttttccataggctccgcccccctgacgagcatcacaaaaatcgacgctcaagtcagaggtggcgaaacccgacaggactataaagataccaggcgtttccccctggaagctccctcgtgcgctctcctgttccgaccctgccgcttaccggatacctgtccgcctttctcccttcgggaagcgtggcgctttctcatagctcacgctgtaggtatctcagttcggtgtaggtcgttcgctccaagctgggctgtgtgcacgaaccccccgttcagcccgaccgctgcgccttatccggtaactatcgtcttgagtccaacccggtaagacacgacttatcgccactggcagcagccactggtaacaggattagcagagcgaggtatgtaggcggtgctacagagttcttgaagtggtggcctaactacggctacactagaagaacagtatttggtatctgcgctctgctgaagccagttaccttcggaaaaagagttggtagctcttgatccggcaaacaaaccaccgctggtagcggtggtttttttgtttgcaagcagcagattacgcgcagaaaaaaaggatctcaagaagatcctttgatcttttctacggggtctgacgctcagtggaacgaaaactcacgttaagggattttggtcatgagattatcaaaaaggatcttcacctagatccttttaaattaaaaatgaagttttaaatcaatctaaagtatatatgagtaaacttggtctgacagttaccaatgcttaatcagtgaggcacctatctcagcgatctgtctatttcgttcatccatagttgcctgactccccgtcgtgtagataactacgatacgggagcgcttaccatctggccccagtgctgcaatgataccgcgagacccacgctcaccggctccagatttatcagcaataaaccagccagccggaagggccgagcgcagaagtggtcctgcaactttatccgcctccattcagtctattaattgttgccgggaagctagagtaagtagttcgccagttaatagtttgcgcaacgttgttggcattgctacaggcatcgtggtgtcactctcgtcgtttggtatggcttcattcagctccggttcccaacgatcaaggcgagttacatgatcccccatgttgtgcaaaaaagcggttagctccttcggtcctccgatcgttgtcagaagtaagttggccgcagtgttatcactcatggttatggcagcactgcataattctcttactgtcatgccatccgtaagatgcttttctgtgactggtgagtactcaaccaagtcattctgagaatagtgtatgcggcgaccgagttgctcttgcccggcgtcaatacgggataatagtgtatcacatagcagaactttaaaagtgctcatcattggaaaacgttcttcggggcgaaaactctcaaggatcttaccgctgttgagatccagttcgatgtaacccactcgtgcacccaactgatcttcagcatcttttactttcaccagcgtttctgggtgagcaaaaacaggaaggcaaaatgccgcaaaaaagggaataagggcgacacggaaatgttgaatactcatactcttcctttttcaatgggtaataactgatataattaaattgaagctctaatttgtgagtttagtatacatgcatttacttataatacagttttttagttttgctggccgcatcttctcaaatatgcttcccagcctgcttttctgtaacgttcaccctctaccttagcatcccttccctttgcaaatagtcctcttccaacaataataatgtcagatcctgtagagaccacatcatccacggttctatactgttgacccaatgcgtctcccttgtcatctaaacccacaccgggtgtcataatcaaccaatcgtaaccttcatctcttccacccatgtctctttgagcaataaagccgataacaaaatctttgtcgctcttcgcaatgtcaacagtacccttagtatattctccagtagatagggagcccttgcatgacaattctgctaacatcaaaaggcctctaggttcctttgttacttcttctgccgcctgcttcaaaccgctaacaatacctgggcccaccacaccgtgtgcattcgtaatgtctgcccattctgctattctgtatacacccgcagagtactgcaatttgactgtattaccaatgtcagcaaattttctgtcttcg

SEQ ID NO: 171 - DNA, 7266 bp, Artificial Sequence
  OXC158-S367N
aagagtaaaaaattgtacttggcggataatgcctttagcggcttaactgtgccctccatggaaaaatcagtcaagatatccacatgtgtttttagtaaacaaattttgggacctaatgcttcaactaactccagtaattccttggtggtacgaacatccaatgaagcacacaagtttgtttgcttttcgtgcatgatattaaatagcttggcagcaacaggactaggatgagtagcagcacgttccttatatgtagctttcgacatgatttatcttcgtttcctgcaggtttttgttctgtgcagttgggttaagaatactgggcaatttcatgtttcttcaacactacatatgcgtatatataccaatctaagtctgtgctccttccttcgttcttccttctgttcggagattaccgaatcaaaaaaatttcaaagaaaccgaaatcaaaaaaaagaataaaaaaaaaatgatgaattgaattgaaaagctagcttatcgatgataagctgtcaaagatgagaattaattccacggactatagactatactagatactccgtctactgtacgatacacttccgctcaggtccttgtcctttaacgaggccttaccactcttttgttactctattgatccagctcagcaaaggcagtgtgatctaagattctatcttcgcgatgtagtaaaactagctagaccgagaaagagactagaaatgcaaaaggcacttctacaatggctgccatcattattatccgatgtgacgctgcagcttctcaatgatattcgaatacgctttgaggagatacagcctaatatccgacaaactgttttacagatttacgatcgtacttgttacccatcattgaattttgaacatccgaacctgggagttttccctgaaacagatagtatatttgaacctgtataataatatatagtctagcgctttacggaagacaatgtatgtatttcggttcctggagaaactattgcatctattgcataggtaatcttgcacgtcgcatccccggttcattttctgcgtttccatcttgcacttcaatagcatatctttgttcgcttgcctgtaacttacacgcgcctcgtatcttttaatgatggaataatttgggaatttactctgtgtttatttatttttatgttttgtatttggattttagaaagtaaataaagaaggtagaagagttacggaatgaagaaaaaaaaataaacaaaggtttaaaaaatttcaacaaaaagcgtactttacatatatatttattagacaagaaaagcagattaaatagatatacattcgattaacgataagtaaaatgtaaaatcacaggattttcgtgtgtggtcttctacacagacaagatgaaacaattcggcattaatacctgagagcaggaagagcaagataaaaggtagtatttgttggcgatccccctagagtcttttacatcttcggaaaacaaaaactattttttctttaatttctttttttactttctatttttaatttatatatttatattaaaaaatttaaattataattatttttatagcacgtgatgaaaaggaccgggaagctccaccccggttgataatcagaaaagccccaaaaacaggaagattgtataagcaaatatttaaattgtaaacgttaatattttgttaaaattcgcgttaaatttttgttaaatcagctcattttttaacgaatagcccgaaatcggcaaaatcccttataaatcaaaagaatagaccgagatagggttgagtgttgttccagtttccaacaagagtccactattaaagaacgtggactccaacgtcaaagggcgaaaaagggtctatcagggcgatggcccactacgtgaaccatcaccctaatcaagttttttggggtcgaggtgccgtaaagcagtaaatcggaagggtaaacggatgcccccatttagagcttgacggggaaagccggcgaacgtggcgagaaaggaagggaagaaagcgaaaggagcgggggctagggcggtgggaagtgtaggggtcacgctgggcgtaaccaccacacccgccgcgcttaatggggcgctacagggcgcgtggggatgatccactagtacggattagaagccgccgagcgggtgacagccctccgaaggaagactctcctccgtgcgtcctcgtcttcaccggtcgcgttcctgaaacgcagatgtgcctcgcgccgcactgctccgaacaataaagattctacaatactagcttttatggttatgaagaggaaaaattggcagtaacctggccccacaaaccttcaaatgaacgaatcaaattaacaaccataggatgataatgcgattagttttttagccttatttctggggtaattaatcagcgaagcgatgatttttgatctattaacagatatataaatgcaaaaactgcataaccactttaactaatactttcaacattttcggtttgtattacttcttattcaaatgtaataaaagtatcaacaaaaaattgttaatatacctctatactttaacgtcaaggagaaaaaaccccggatcggactactagcagctgtaatacgactcactatagggaatattaagcttaaacaatgaggcaggtttggttctcttggattgtgggattgttcctatgttttttcaacgtgtcttctgctgctccagtcaacactacaacagaagatgaaacggcacaaattccggctgaagctgtcatcggttactcagatttagaaggggatttcgatgttgctgttttgccattttccaacagcacaaataacgggttattgtttataaatactactattgccagcattgctgctaaagaagaaggggtatctctcgagaaaagagaggctgaagctatgccatgggaaaacttcttgaagtgcttctcccaatatatcccaaacaacgagactaacttaaagttagtttacactcaaaacaatccattatacatgtctgtcttaaactctactattcataacttaagatttacttccgatcggacccctaagccattggttatcgtcaccccatctcacgtctcccatatccaaggtactatcttatgttctaagaaggttggtttgcaaatccgtactagatctggtggtcacgactctgaaggtatgtcctatatctctcaagagccatttgtcattgttgacttaagaaatatgagatccattaaaattgatgttcattctcaaactgcttgggtcgaagctggtgccaccttgggtgaagtttactactgggtcaacgaaaaaaacgaaaacttatctttagctgccggttactgtccaaccgtctgtgctggtggtcatttcggtggtggtggttacggtccattgatgcgtaactacggtttagctgctgacaacattattgacgctcatttagttaatgttcacggtaaggttttggacagaaaatctatgggtgaagatttattttgggccttgagaggtggtggtgctgaatccttcggtatcatcgttgcctggaagattcgtttagttgctgtcccttctaagtccaccatgttctccgtcaagaaaatcatggaaattcatgagttggtcaaattggttaacaagtggcaaaacatcgcttacaagtatgacaaggatttgttgttaatgactcacttcatcacccgtaatatcaccgacaaccaaggtaagaacaaaactgctattcacacctacttctcctccgtttttttgggtggtgtcgactccttagtcgatttgatgaacaaatcctttccagaattgggtattaagaaaactgattgtagacaattgtcttggattgacaccattatcttctattctggtgtcgttaactacgacaccgacaactttaacaaggaaattttgttggatcgttctgctggtcaaaatatcgccttcaaaatcaaattggactacgtcaaaaagccaatcccagaaaacgttttcgttcaaattttggaaaagttgtacgaagaagacattggtgtgggtatgtatgctttgtatccatatggtggtatcatggacgaaatttccgaatctgccatcccattcccacacagagctggtattttatatgaattgtggtacatctgttcttgggaaaagcaagaagacaacgaaaagcatttaaactggattagaaacatttacaacttcatgaccccatacgtttctaagaacccaagaggcgcctatttgaactaccgtgacttagatattggtattaatgacccaaagaacccaaacaactatactcaagccagaatttggggtgaaaagtacttcggtaagaacttcgatagattagttaaggttaaaactttggtcgatccaaacaacttcttcagaaacgaacaatccatcccaccattgccaagacatcgtcacggccatcatcaccatcaccattagctcgagcatgcatctagagggccgcatcatgtaattagttatgtcacgcttacattcacgccctccccccacatccgctctaaccgaaaaggaaggagttagacaacctgaagtctaggtccctatttatttttttatagttatgttagtattaagaacgttatttatatttcaaatttttcttttttttctgtacagacgcgtgtacgcatgtaacattatactgaaaaccttgcttgagaaggttttgggacgctcgaaggctttaatttgcggccctgcattaatgaatcggccaacgcgcggggagaggcggtttgcgtattgggcgctcttccgcttcctcgctcactgactcgctgcgctcggtcgttcggctgcggcgagcggtatcagctcactcaaaggcggtaatacggttatccacagaatcaggggataacgcaggaaagaacatgtgagcaaaaggccagcaaaagcccaggaaccgtaaaaaggccgcgttgctggcgtttttccataggctccgcccccctgacgagcatcacaaaaatcgacgctcaagtcagaggtggcgaaacccgacaggactataaagataccaggcgtttccccctggaagctccctcgtgcgctctcctgttccgaccctgccgcttaccggatacctgtccgcctttctcccttcgggaagcgtggcgctttctcatagctcacgctgtaggtatctcagttcggtgtaggtcgttcgctccaagctgggctgtgtgcacgaaccccccgttcagcccgaccgctgcgccttatccggtaactatcgtcttgagtccaacccggtaagacacgacttatcgccactggcagcagccactggtaacaggattagcagagcgaggtatgtaggcggtgctacagagttcttgaagtggtggcctaactacggctacactagaagaacagtatttggtatctgcgctctgctgaagccagttaccttcggaaaaagagttggtagctcttgatccggcaaacaaaccaccgctggtagcggtggtttttttgtttgcaagcagcagattacgcgcagaaaaaaaggatctcaagaagatcctttgatcttttctacggggtctgacgctcagtggaacgaaaactcacgttaagggattttggtcatgagattatcaaaaaggatcttcacctagatccttttaaattaaaaatgaagttttaaatcaatctaaagtatatatgagtaaacttggtctgacagttaccaatgcttaatcagtgaggcacctatctcagcgatctgtctatttcgttcatccatagttgcctgactccccgtcgtgtagataactacgatacgggagcgcttaccatctggccccagtgctgcaatgataccgcgagacccacgctcaccggctccagatttatcagcaataaaccagccagccggaagggccgagcgcagaagtggtcctgcaactttatccgcctccattcagtctattaattgttgccgggaagctagagtaagtagttcgccagttaatagtttgcgcaacgttgttggcattgctacaggcatcgtggtgtcactctcgtcgtttggtatggcttcattcagctccggttcccaacgatcaaggcgagttacatgatcccccatgttgtgcaaaaaagcggttagctccttcggtcctccgatcgttgtcagaagtaagttggccgcagtgttatcactcatggttatggcagcactgcataattctcttactgtcatgccatccgtaagatgcttttctgtgactggtgagtactcaaccaagtcattctgagaatagtgtatgcggcgaccgagttgctcttgcccggcgtcaatacgggataatagtgtatcacatagcagaactttaaaagtgctcatcattggaaaacgttcttcggggcgaaaactctcaaggatcttaccgctgttgagatccagttcgatgtaacccactcgtgcacccaactgatcttcagcatcttttactttcaccagcgtttctgggtgagcaaaaacaggaaggcaaaatgccgcaaaaaagggaataagggcgacacggaaatgttgaatactcatactcttcctttttcaatgggtaataactgatataattaaattgaagctctaatttgtgagtttagtatacatgcatttacttataatacagttttttagttttgctggccgcatcttctcaaatatgcttcccagcctgcttttctgtaacgttcaccctctaccttagcatcccttccctttgcaaatagtcctcttccaacaataataatgtcagatcctgtagagaccacatcatccacggttctatactgttgacccaatgcgtctcccttgtcatctaaacccacaccgggtgtcataatcaaccaatcgtaaccttcatctcttccacccatgtctctttgagcaataaagccgataacaaaatctttgtcgctcttcgcaatgtcaacagtacccttagtatattctccagtagatagggagcccttgcatgacaattctgctaacatcaaaaggcctctaggttcctttgttacttcttctgccgcctgcttcaaaccgctaacaatacctgggcccaccacaccgtgtgcattcgtaatgtctgcccattctgctattctgtatacacccgcagagtactgcaatttgactgtattaccaatgtcagcaaattttctgtcttcg

SEQ ID NO: 172 - DNA, 7266 bp, Artificial Sequence
  OXC158-S367R(=AGG)
aagagtaaaaaattgtacttggcggataatgcctttagcggcttaactgtgccctccatggaaaaatcagtcaagatatccacatgtgtttttagtaaacaaattttgggacctaatgcttcaactaactccagtaattccttggtggtacgaacatccaatgaagcacacaagtttgtttgcttttcgtgcatgatattaaatagcttggcagcaacaggactaggatgagtagcagcacgttccttatatgtagctttcgacatgatttatcttcgtttcctgcaggtttttgttctgtgcagttgggttaagaatactgggcaatttcatgtttcttcaacactacatatgcgtatatataccaatctaagtctgtgctccttccttcgttcttccttctgttcggagattaccgaatcaaaaaaatttcaaagaaaccgaaatcaaaaaaaagaataaaaaaaaaatgatgaattgaattgaaaagctagcttatcgatgataagctgtcaaagatgagaattaattccacggactatagactatactagatactccgtctactgtacgatacacttccgctcaggtccttgtcctttaacgaggccttaccactcttttgttactctattgatccagctcagcaaaggcagtgtgatctaagattctatcttcgcgatgtagtaaaactagctagaccgagaaagagactagaaatgcaaaaggcacttctacaatggctgccatcattattatccgatgtgacgctgcagcttctcaatgatattcgaatacgctttgaggagatacagcctaatatccgacaaactgttttacagatttacgatcgtacttgttacccatcattgaattttgaacatccgaacctgggagttttccctgaaacagatagtatatttgaacctgtataataatatatagtctagcgctttacggaagacaatgtatgtatttcggttcctggagaaactattgcatctattgcataggtaatcttgcacgtcgcatccccggttcattttctgcgtttccatcttgcacttcaatagcatatctttgttcgcttgcctgtaacttacacgcgcctcgtatcttttaatgatggaataatttgggaatttactctgtgtttatttatttttatgttttgtatttggattttagaaagtaaataaagaaggtagaagagttacggaatgaagaaaaaaaaataaacaaaggtttaaaaaatttcaacaaaaagcgtactttacatatatatttattagacaagaaaagcagattaaatagatatacattcgattaacgataagtaaaatgtaaaatcacaggattttcgtgtgtggtcttctacacagacaagatgaaacaattcggcattaatacctgagagcaggaagagcaagataaaaggtagtatttgttggcgatccccctagagtcttttacatcttcggaaaacaaaaactattttttctttaatttctttttttactttctatttttaatttatatatttatattaaaaaatttaaattataattatttttatagcacgtgatgaaaaggaccgggaagctccaccccggttgataatcagaaaagccccaaaaacaggaagattgtataagcaaatatttaaattgtaaacgttaatattttgttaaaattcgcgttaaatttttgttaaatcagctcattttttaacgaatagcccgaaatcggcaaaatcccttataaatcaaaagaatagaccgagatagggttgagtgttgttccagtttccaacaagagtccactattaaagaacgtggactccaacgtcaaagggcgaaaaagggtctatcagggcgatggcccactacgtgaaccatcaccctaatcaagttttttggggtcgaggtgccgtaaagcagtaaatcggaagggtaaacggatgcccccatttagagcttgacggggaaagccggcgaacgtggcgagaaaggaagggaagaaagcgaaaggagcgggggctagggcggtgggaagtgtaggggtcacgctgggcgtaaccaccacacccgccgcgcttaatggggcgctacagggcgcgtggggatgatccactagtacggattagaagccgccgagcgggtgacagccctccgaaggaagactctcctccgtgcgtcctcgtcttcaccggtcgcgttcctgaaacgcagatgtgcctcgcgccgcactgctccgaacaataaagattctacaatactagcttttatggttatgaagaggaaaaattggcagtaacctggccccacaaaccttcaaatgaacgaatcaaattaacaaccataggatgataatgcgattagttttttagccttatttctggggtaattaatcagcgaagcgatgatttttgatctattaacagatatataaatgcaaaaactgcataaccactttaactaatactttcaacattttcggtttgtattacttcttattcaaatgtaataaaagtatcaacaaaaaattgttaatatacctctatactttaacgtcaaggagaaaaaaccccggatcggactactagcagctgtaatacgactcactatagggaatattaagcttaaacaatgaggcaggtttggttctcttggattgtgggattgttcctatgttttttcaacgtgtcttctgctgctccagtcaacactacaacagaagatgaaacggcacaaattccggctgaagctgtcatcggttactcagatttagaaggggatttcgatgttgctgttttgccattttccaacagcacaaataacgggttattgtttataaatactactattgccagcattgctgctaaagaagaaggggtatctctcgagaaaagagaggctgaagctatgccatgggaaaacttcttgaagtgcttctcccaatatatcccaaacaacgagactaacttaaagttagtttacactcaaaacaatccattatacatgtctgtcttaaactctactattcataacttaagatttacttccgatcggacccctaagccattggttatcgtcaccccatctcacgtctcccatatccaaggtactatcttatgttctaagaaggttggtttgcaaatccgtactagatctggtggtcacgactctgaaggtatgtcctatatctctcaagagccatttgtcattgttgacttaagaaatatgagatccattaaaattgatgttcattctcaaactgcttgggtcgaagctggtgccaccttgggtgaagtttactactgggtcaacgaaaaaaacgaaaacttatctttagctgccggttactgtccaaccgtctgtgctggtggtcatttcggtggtggtggttacggtccattgatgcgtaactacggtttagctgctgacaacattattgacgctcatttagttaatgttcacggtaaggttttggacagaaaatctatgggtgaagatttattttgggccttgagaggtggtggtgctgaatccttcggtatcatcgttgcctggaagattcgtttagttgctgtcccttctaagtccaccatgttctccgtcaagaaaatcatggaaattcatgagttggtcaaattggttaacaagtggcaaaacatcgcttacaagtatgacaaggatttgttgttaatgactcacttcatcacccgtaatatcaccgacaaccaaggtaagaacaaaactgctattcacacctacttctcctccgtttttttgggtggtgtcgactccttagtcgatttgatgaacaaatcctttccagaattgggtattaagaaaactgattgtagacaattgtcttggattgacaccattatcttctattctggtgtcgttaactacgacaccgacaactttaacaaggaaattttgttggatcgttctgctggtcaaaatatcgccttcaaaatcaaattggactacgtcaaaaagccaatcccagaaagggttttcgttcaaattttggaaaagttgtacgaagaagacattggtgtgggtatgtatgctttgtatccatatggtggtatcatggacgaaatttccgaatctgccatcccattcccacacagagctggtattttatatgaattgtggtacatctgttcttgggaaaagcaagaagacaacgaaaagcatttaaactggattagaaacatttacaacttcatgaccccatacgtttctaagaacccaagaggcgcctatttgaactaccgtgacttagatattggtattaatgacccaaagaacccaaacaactatactcaagccagaatttggggtgaaaagtacttcggtaagaacttcgatagattagttaaggttaaaactttggtcgatccaaacaacttcttcagaaacgaacaatccatcccaccattgccaagacatcgtcacggccatcatcaccatcaccattagctcgagcatgcatctagagggccgcatcatgtaattagttatgtcacgcttacattcacgccctccccccacatccgctctaaccgaaaaggaaggagttagacaacctgaagtctaggtccctatttatttttttatagttatgttagtattaagaacgttatttatatttcaaatttttcttttttttctgtacagacgcgtgtacgcatgtaacattatactgaaaaccttgcttgagaaggttttgggacgctcgaaggctttaatttgcggccctgcattaatgaatcggccaacgcgcggggagaggcggtttgcgtattgggcgctcttccgcttcctcgctcactgactcgctgcgctcggtcgttcggctgcggcgagcggtatcagctcactcaaaggcggtaatacggttatccacagaatcaggggataacgcaggaaagaacatgtgagcaaaaggccagcaaaagcccaggaaccgtaaaaaggccgcgttgctggcgtttttccataggctccgcccccctgacgagcatcacaaaaatcgacgctcaagtcagaggtggcgaaacccgacaggactataaagataccaggcgtttccccctggaagctccctcgtgcgctctcctgttccgaccctgccgcttaccggatacctgtccgcctttctcccttcgggaagcgtggcgctttctcatagctcacgctgtaggtatctcagttcggtgtaggtcgttcgctccaagctgggctgtgtgcacgaaccccccgttcagcccgaccgctgcgccttatccggtaactatcgtcttgagtccaacccggtaagacacgacttatcgccactggcagcagccactggtaacaggattagcagagcgaggtatgtaggcggtgctacagagttcttgaagtggtggcctaactacggctacactagaagaacagtatttggtatctgcgctctgctgaagccagttaccttcggaaaaagagttggtagctcttgatccggcaaacaaaccaccgctggtagcggtggtttttttgtttgcaagcagcagattacgcgcagaaaaaaaggatctcaagaagatcctttgatcttttctacggggtctgacgctcagtggaacgaaaactcacgttaagggattttggtcatgagattatcaaaaaggatcttcacctagatccttttaaattaaaaatgaagttttaaatcaatctaaagtatatatgagtaaacttggtctgacagttaccaatgcttaatcagtgaggcacctatctcagcgatctgtctatttcgttcatccatagttgcctgactccccgtcgtgtagataactacgatacgggagcgcttaccatctggccccagtgctgcaatgataccgcgagacccacgctcaccggctccagatttatcagcaataaaccagccagccggaagggccgagcgcagaagtggtcctgcaactttatccgcctccattcagtctattaattgttgccgggaagctagagtaagtagttcgccagttaatagtttgcgcaacgttgttggcattgctacaggcatcgtggtgtcactctcgtcgtttggtatggcttcattcagctccggttcccaacgatcaaggcgagttacatgatcccccatgttgtgcaaaaaagcggttagctccttcggtcctccgatcgttgtcagaagtaagttggccgcagtgttatcactcatggttatggcagcactgcataattctcttactgtcatgccatccgtaagatgcttttctgtgactggtgagtactcaaccaagtcattctgagaatagtgtatgcggcgaccgagttgctcttgcccggcgtcaatacgggataatagtgtatcacatagcagaactttaaaagtgctcatcattggaaaacgttcttcggggcgaaaactctcaaggatcttaccgctgttgagatccagttcgatgtaacccactcgtgcacccaactgatcttcagcatcttttactttcaccagcgtttctgggtgagcaaaaacaggaaggcaaaatgccgcaaaaaagggaataagggcgacacggaaatgttgaatactcatactcttcctttttcaatgggtaataactgatataattaaattgaagctctaatttgtgagtttagtatacatgcatttacttataatacagttttttagttttgctggccgcatcttctcaaatatgcttcccagcctgcttttctgtaacgttcaccctctaccttagcatcccttccctttgcaaatagtcctcttccaacaataataatgtcagatcctgtagagaccacatcatccacggttctatactgttgacccaatgcgtctcccttgtcatctaaacccacaccgggtgtcataatcaaccaatcgtaaccttcatctcttccacccatgtctctttgagcaataaagccgataacaaaatctttgtcgctcttcgcaatgtcaacagtacccttagtatattctccagtagatagggagcccttgcatgacaattctgctaacatcaaaaggcctctaggttcctttgttacttcttctgccgcctgcttcaaaccgctaacaatacctgggcccaccacaccgtgtgcattcgtaatgtctgcccattctgctattctgtatacacccgcagagtactgcaatttgactgtattaccaatgtcagcaaattttctgtcttcg

SEQ ID NO: 173 - protein, 524 aa, Artificial Sequence
  Seq ID no. 173 OXC158-I351G
MPWENFLKCFSQYIPNNETNLKLVYTQNNPLYMSVLNSTIHNLRFTSDRTPKPLVIVTPSHVSHIQGTILCSKKVGLQIRTRSGGHDSEGMSYISQEPFVIVDLRNMRSIKIDVHSQTAWVEAGATLGEVYYWVNEKNENLSLAAGYCPTVCAGGHFGGGGYGPLMRNYGLAADNIIDAHLVNVHGKVLDRKSMGEDLFWALRGGGAESFGIIVAWKIRLVAVPSKSTMFSVKKIMEIHELVKLVNKWQNIAYKYDKDLLLMTHFITRNITDNQGKNKTAIHTYFSSVFLGGVDSLVDLMNKSFPELGIKKTDCRQLSWIDTIIFYSGVVNYDTDNFNKEILLDRSAGQNGAFKIKLDYVKKPIPESVFVQILEKLYEEDIGVGMYALYPYGGIMDEISESAIPFPHRAGILYELWYICSWEKQEDNEKHLNWIRNIYNFMTPYVSKNPRGAYLNYRDLDIGINDPKNPNNYTQARIWGEKYFGKNFDRLVKVKTLVDPNNFFRNEQSIPPLPRHRHGHHHHHH

SEQ ID NO: 174 - protein, 524 aa, Artificial Sequence
  Seq ID no. 174 OXC158-S367R(=CGG)
MPWENFLKCFSQYIPNNETNLKLVYTQNNPLYMSVLNSTIHNLRFTSDRTPKPLVIVTPSHVSHIQGTILCSKKVGLQIRTRSGGHDSEGMSYISQEPFVIVDLRNMRSIKIDVHSQTAWVEAGATLGEVYYWVNEKNENLSLAAGYCPTVCAGGHFGGGGYGPLMRNYGLAADNIIDAHLVNVHGKVLDRKSMGEDLFWALRGGGAESFGIIVAWKIRLVAVPSKSTMFSVKKIMEIHELVKLVNKWQNIAYKYDKDLLLMTHFITRNITDNQGKNKTAIHTYFSSVFLGGVDSLVDLMNKSFPELGIKKTDCRQLSWIDTIIFYSGVVNYDTDNFNKEILLDRSAGQNIAFKIKLDYVKKPIPERVFVQILEKLYEEDIGVGMYALYPYGGIMDEISESAIPFPHRAGILYELWYICSWEKQEDNEKHLNWIRNIYNFMTPYVSKNPRGAYLNYRDLDIGINDPKNPNNYTQARIWGEKYFGKNFDRLVKVKTLVDPNNFFRNEQSIPPLPRHRHGHHHHHH

SEQ ID NO: 175 - protein, 524 aa, Artificial Sequence
  Seq ID no. 175 OXC158-Q274G
MPWENFLKCFSQYIPNNETNLKLVYTQNNPLYMSVLNSTIHNLRFTSDRTPKPLVIVTPSHVSHIQGTILCSKKVGLQIRTRSGGHDSEGMSYISQEPFVIVDLRNMRSIKIDVHSQTAWVEAGATLGEVYYWVNEKNENLSLAAGYCPTVCAGGHFGGGGYGPLMRNYGLAADNIIDAHLVNVHGKVLDRKSMGEDLFWALRGGGAESFGIIVAWKIRLVAVPSKSTMFSVKKIMEIHELVKLVNKWQNIAYKYDKDLLLMTHFITRNITDNGGKNKTAIHTYFSSVFLGGVDSLVDLMNKSFPELGIKKTDCRQLSWIDTIIFYSGVVNYDTDNFNKEILLDRSAGQNIAFKIKLDYVKKPIPESVFVQILEKLYEEDIGVGMYALYPYGGIMDEISESAIPFPHRAGILYELWYICSWEKQEDNEKHLNWIRNIYNFMTPYVSKNPRGAYLNYRDLDIGINDPKNPNNYTQARIWGEKYFGKNFDRLVKVKTLVDPNNFFRNEQSIPPLPRHRHGHHHHHH

SEQ ID NO: 176 - protein, 524 aa, Artificial Sequence
  Seq ID no. 176 OXC158-I351M
MPWENFLKCFSQYIPNNETNLKLVYTQNNPLYMSVLNSTIHNLRFTSDRTPKPLVIVTPSHVSHIQGTILCSKKVGLQIRTRSGGHDSEGMSYISQEPFVIVDLRNMRSIKIDVHSQTAWVEAGATLGEVYYWVNEKNENLSLAAGYCPTVCAGGHFGGGGYGPLMRNYGLAADNIIDAHLVNVHGKVLDRKSMGEDLFWALRGGGAESFGIIVAWKIRLVAVPSKSTMFSVKKIMEIHELVKLVNKWQNIAYKYDKDLLLMTHFITRNITDNQGKNKTAIHTYFSSVFLGGVDSLVDLMNKSFPELGIKKTDCRQLSWIDTIIFYSGVVNYDTDNFNKEILLDRSAGQNMAFKIKLDYVKKPIPESVFVQILEKLYEEDIGVGMYALYPYGGIMDEISESAIPFPHRAGILYELWYICSWEKQEDNEKHLNWIRNIYNFMTPYVSKNPRGAYLNYRDLDIGINDPKNPNNYTQARIWGEKYFGKNFDRLVKVKTLVDPNNFFRNEQSIPPLPRHRHGHHHHHH

SEQ ID NO: 177 - protein, 524 aa, Artificial Sequence
  Seq ID no. 177 OXC158-V383A
MPWENFLKCFSQYIPNNETNLKLVYTQNNPLYMSVLNSTIHNLRFTSDRTPKPLVIVTPSHVSHIQGTILCSKKVGLQIRTRSGGHDSEGMSYISQEPFVIVDLRNMRSIKIDVHSQTAWVEAGATLGEVYYWVNEKNENLSLAAGYCPTVCAGGHFGGGGYGPLMRNYGLAADNIIDAHLVNVHGKVLDRKSMGEDLFWALRGGGAESFGIIVAWKIRLVAVPSKSTMFSVKKIMEIHELVKLVNKWQNIAYKYDKDLLLMTHFITRNITDNQGKNKTAIHTYFSSVFLGGVDSLVDLMNKSFPELGIKKTDCRQLSWIDTIIFYSGVVNYDTDNFNKEILLDRSAGQNIAFKIKLDYVKKPIPESVFVQILEKLYEEDIGAGMYALYPYGGIMDEISESAIPFPHRAGILYELWYICSWEKQEDNEKHLNWIRNIYNFMTPYVSKNPRGAYLNYRDLDIGINDPKNPNNYTQARIWGEKYFGKNFDRLVKVKTLVDPNNFFRNEQSIPPLPRHRHGHHHHHH

SEQ ID NO: 178 - protein, 524 aa, Artificial Sequence
  Seq ID no. 178 OXC158-S367Q
MPWENFLKCFSQYIPNNETNLKLVYTQNNPLYMSVLNSTIHNLRFTSDRTPKPLVIVTPSHVSHIQGTILCSKKVGLQIRTRSGGHDSEGMSYISQEPFVIVDLRNMRSIKIDVHSQTAWVEAGATLGEVYYWVNEKNENLSLAAGYCPTVCAGGHFGGGGYGPLMRNYGLAADNIIDAHLVNVHGKVLDRKSMGEDLFWALRGGGAESFGIIVAWKIRLVAVPSKSTMFSVKKIMEIHELVKLVNKWQNIAYKYDKDLLLMTHFITRNITDNQGKNKTAIHTYFSSVFLGGVDSLVDLMNKSFPELGIKKTDCRQLSWIDTIIFYSGVVNYDTDNFNKEILLDRSAGQNIAFKIKLDYVKKPIPEQVFVQILEKLYEEDIGVGMYALYPYGGIMDEISESAIPFPHRAGILYELWYICSWEKQEDNEKHLNWIRNIYNFMTPYVSKNPRGAYLNYRDLDIGINDPKNPNNYTQARIWGEKYFGKNFDRLVKVKTLVDPNNFFRNEQSIPPLPRHRHGHHHHHH

SEQ ID NO: 179 - protein, 524 aa, Artificial Sequence
  Seq ID no. 179 OXC158-S367N
MPWENFLKCFSQYIPNNETNLKLVYTQNNPLYMSVLNSTIHNLRFTSDRTPKPLVIVTPSHVSHIQGTILCSKKVGLQIRTRSGGHDSEGMSYISQEPFVIVDLRNMRSIKIDVHSQTAWVEAGATLGEVYYWVNEKNENLSLAAGYCPTVCAGGHFGGGGYGPLMRNYGLAADNIIDAHLVNVHGKVLDRKSMGEDLFWALRGGGAESFGIIVAWKIRLVAVPSKSTMFSVKKIMEIHELVKLVNKWQNIAYKYDKDLLLMTHFITRNITDNQGKNKTAIHTYFSSVFLGGVDSLVDLMNKSFPELGIKKTDCRQLSWIDTIIFYSGVVNYDTDNFNKEILLDRSAGQNIAFKIKLDYVKKPIPENVFVQILEKLYEEDIGVGMYALYPYGGIMDEISESAIPFPHRAGILYELWYICSWEKQEDNEKHLNWIRNIYNFMTPYVSKNPRGAYLNYRDLDIGINDPKNPNNYTQARIWGEKYFGKNFDRLVKVKTLVDPNNFFRNEQSIPPLPRHRHGHHHHHH

SEQ ID NO: 180 - protein, 524 aa, Artificial Sequence; identical to SEQ ID NO: 174
  Seq ID no. 180 OXC158-S367R(=AGG)

SEQ ID NO: 181 - DNA, 1575 bp, Artificial Sequence
  OXC158-L31E/V383G
atgccatgggaaaacttcttgaagtgcttctcccaatatatcccaaacaacgagactaacttaaagttagtttacactcaaaacaatccagagtacatgtctgtcttaaactctactattcataacttaagatttacttccgatcggacccctaagccattggttatcgtcaccccatctcacgtctcccatatccaaggtactatcttatgttctaagaaggttggtttgcaaatccgtactagatctggtggtcacgactctgaaggtatgtcctatatctctcaagagccatttgtcattgttgacttaagaaatatgagatccattaaaattgatgttcattctcaaactgcttgggtcgaagctggtgccaccttgggtgaagtttactactgggtcaacgaaaaaaacgaaaacttatctttagctgccggttactgtccaaccgtctgtgctggtggtcatttcggtggtggtggttacggtccattgatgcgtaactacggtttagctgctgacaacattattgacgctcatttagttaatgttcacggtaaggttttggacagaaaatctatgggtgaagatttattttgggccttgagaggtggtggtgctgaatccttcggtatcatcgttgcctggaagattcgtttagttgctgtcccttctaagtccaccatgttctccgtcaagaaaatcatggaaattcatgagttggtcaaattggttaacaagtggcaaaacatcgcttacaagtatgacaaggatttgttgttaatgactcacttcatcacccgtaatatcaccgacaaccaaggtaagaacaaaactgctattcacacctacttctcctccgtttttttgggtggtgtcgactccttagtcgatttgatgaacaaatcctttccagaattgggtattaagaaaactgattgtagacaattgtcttggattgacaccattatcttctattctggtgtcgttaactacgacaccgacaactttaacaaggaaattttgttggatcgttctgctggtcaaaatatcgccttcaaaatcaaattggactacgtcaaaaagccaatcccagaatctgttttcgttcaaattttggaaaagttgtacgaagaagacattggtggtggtatgtatgctttgtatccatatggtggtatcatggacgaaatttccgaatctgccatcccattcccacacagagctggtattttatatgaattgtggtacatctgttcttgggaaaagcaagaagacaacgaaaagcatttaaactggattagaaacatttacaacttcatgaccccatacgtttctaagaacccaagaggcgcctatttgaactaccgtgacttagatattggtattaatgacccaaagaacccaaacaactatactcaagccagaatttggggtgaaaagtacttcggtaagaacttcgatagattagttaaggttaaaactttggtcgatccaaacaacttcttcagaaacgaacaatccatcccaccattgccaagacatcgtcacggccatcatcaccatcaccattag

SEQ ID NO: 182 - DNA, 1575 bp, Artificial Sequence
  OXC158-N138T/V383M/H515E
atgccatgggaaaacttcttgaagtgcttctcccaatatatcccaaacaacgagactaacttaaagttagtttacactcaaaacaatccattatacatgtctgtcttaaactctactattcataacttaagatttacttccgatcggacccctaagccattggttatcgtcaccccatctcacgtctcccatatccaaggtactatcttatgttctaagaaggttggtttgcaaatccgtactagatctggtggtcacgactctgaaggtatgtcctatatctctcaagagccatttgtcattgttgacttaagaaatatgagatccattaaaattgatgttcattctcaaactgcttgggtcgaagctggtgccaccttgggtgaagtttactactgggtcaacgaaaaaaccgaaaacttatctttagctgccggttactgtccaaccgtctgtgctggtggtcatttcggtggtggtggttacggtccattgatgcgtaactacggtttagctgctgacaacattattgacgctcatttagttaatgttcacggtaaggttttggacagaaaatctatgggtgaagatttattttgggccttgagaggtggtggtgctgaatccttcggtatcatcgttgcctggaagattcgtttagttgctgtcccttctaagtccaccatgttctccgtcaagaaaatcatggaaattcatgagttggtcaaattggttaacaagtggcaaaacatcgcttacaagtatgacaaggatttgttgttaatgactcacttcatcacccgtaatatcaccgacaaccaaggtaagaacaaaactgctattcacacctacttctcctccgtttttttgggtggtgtcgactccttagtcgatttgatgaacaaatcctttccagaattgggtattaagaaaactgattgtagacaattgtcttggattgacaccattatcttctattctggtgtcgttaactacgacaccgacaactttaacaaggaaattttgttggatcgttctgctggtcaaaatatcgccttcaaaatcaaattggactacgtcaaaaagccaatcccagaatctgttttcgttcaaattttggaaaagttgtacgaagaagacattggtatgggtatgtatgctttgtatccatatggtggtatcatggacgaaatttccgaatctgccatcccattcccacacagagctggtattttatatgaattgtggtacatctgttcttgggaaaagcaagaagacaacgaaaagcatttaaactggattagaaacatttacaacttcatgaccccatacgtttctaagaacccaagaggcgcctatttgaactaccgtgacttagatattggtattaatgacccaaagaacccaaacaactatactcaagccagaatttggggtgaaaagtacttcggtaagaacttcgatagattagttaaggttaaaactttggtcgatccaaacaacttcttcagaaacgaacaatccatcccaccattgccaagagagcgtcacggccatcatcaccatcaccattag

SEQ ID NO: 183 - DNA, 1575 bp, Artificial Sequence
  OXC158-S367K/V383A/P513V
atgccatgggaaaacttcttgaagtgcttctcccaatatatcccaaacaacgagactaacttaaagttagtttacactcaaaacaatccattatacatgtctgtcttaaactctactattcataacttaagatttacttccgatcggacccctaagccattggttatcgtcaccccatctcacgtctcccatatccaaggtactatcttatgttctaagaaggttggtttgcaaatccgtactagatctggtggtcacgactctgaaggtatgtcctatatctctcaagagccatttgtcattgttgacttaagaaatatgagatccattaaaattgatgttcattctcaaactgcttgggtcgaagctggtgccaccttgggtgaagtttactactgggtcaacgaaaaaaacgaaaacttatctttagctgccggttactgtccaaccgtctgtgctggtggtcatttcggtggtggtggttacggtccattgatgcgtaactacggtttagctgctgacaacattattgacgctcatttagttaatgttcacggtaaggttttggacagaaaatctatgggtgaagatttattttgggccttgagaggtggtggtgctgaatccttcggtatcatcgttgcctggaagattcgtttagttgctgtcccttctaagtccaccatgttctccgtcaagaaaatcatggaaattcatgagttggtcaaattggttaacaagtggcaaaacatcgcttacaagtatgacaaggatttgttgttaatgactcacttcatcacccgtaatatcaccgacaaccaaggtaagaacaaaactgctattcacacctacttctcctccgtttttttgggtggtgtcgactccttagtcgatttgatgaacaaatcctttccagaattgggtattaagaaaactgattgtagacaattgtcttggattgacaccattatcttctattctggtgtcgttaactacgacaccgacaactttaacaaggaaattttgttggatcgttctgctggtcaaaatatcgccttcaaaatcaaattggactacgtcaaaaagccaatcccagaaaaggttttcgttcaaattttggaaaagttgtacgaagaagacattggtgcgggtatgtatgctttgtatccatatggtggtatcatggacgaaatttccgaatctgccatcccattcccacacagagctggtattttatatgaattgtggtacatctgttcttgggaaaagcaagaagacaacgaaaagcatttaaactggattagaaacatttacaacttcatgaccccatacgtttctaagaacccaagaggcgcctatttgaactaccgtgacttagatattggtattaatgacccaaagaacccaaacaactatactcaagccagaatttggggtgaaaagtacttcggtaagaacttcgatagattagttaaggttaaaactttggtcgatccaaacaacttcttcagaaacgaacaatccatcccaccattggtcagacatcgtcacggccatcatcaccatcaccattag

SEQ ID NO: 184 - DNA, 1575 bp, Artificial Sequence
  OXC158-V383A
atgccatgggaaaacttcttgaagtgcttctcccaatatatcccaaacaacgagactaacttaaagttagtttacactcaaaacaatccattatacatgtctgtcttaaactctactattcataacttaagatttacttccgatcggacccctaagccattggttatcgtcaccccatctcacgtctcccatatccaaggtactatcttatgttctaagaaggttggtttgcaaatccgtactagatctggtggtcacgactctgaaggtatgtcctatatctctcaagagccatttgtcattgttgacttaagaaatatgagatccattaaaattgatgttcattctcaaactgcttgggtcgaagctggtgccaccttgggtgaagtttactactgggtcaacgaaaaaaacgaaaacttatctttagctgccggttactgtccaaccgtctgtgctggtggtcatttcggtggtggtggttacggtccattgatgcgtaactacggtttagctgctgacaacattattgacgctcatttagttaatgttcacggtaaggttttggacagaaaatctatgggtgaagatttattttgggccttgagaggtggtggtgctgaatccttcggtatcatcgttgcctggaagattcgtttagttgctgtcccttctaagtccaccatgttctccgtcaagaaaatcatggaaattcatgagttggtcaaattggttaacaagtggcaaaacatcgcttacaagtatgacaaggatttgttgttaatgactcacttcatcacccgtaatatcaccgacaaccaaggtaagaacaaaactgctattcacacctacttctcctccgtttttttgggtggtgtcgactccttagtcgatttgatgaacaaatcctttccagaattgggtattaagaaaactgattgtagacaattgtcttggattgacaccattatcttctattctggtgtcgttaactacgacaccgacaactttaacaaggaaattttgttggatcgttctgctggtcaaaatatcgccttcaaaatcaaattggactacgtcaaaaagccaatcccagaatctgttttcgttcaaattttggaaaagttgtacgaagaagacattggtgcgggtatgtatgctttgtatccatatggtggtatcatggacgaaatttccgaatctgccatcccattcccacacagagctggtattttatatgaattgtggtacatctgttcttgggaaaagcaagaagacaacgaaaagcatttaaactggattagaaacatttacaacttcatgaccccatacgtttctaagaacccaagaggcgcctatttgaactaccgtgacttagatattggtattaatgacccaaagaacccaaacaactatactcaagccagaatttggggtgaaaagtacttcggtaagaacttcgatagattagttaaggttaaaactttggtcgatccaaacaacttcttcagaaacgaacaatccatcccaccattgccaagacatcgtcacggccatcatcaccatcaccattag

SEQ ID NO: 185 - DNA, 1575 bp, Artificial Sequence
  OXC158-W3A/L31E/K226M/S367Q/V383M/S399G/P513V
atgccagctgaaaacttcttgaagtgcttctcccaatatatcccaaacaacgagactaacttaaagttagtttacactcaaaacaatccagagtacatgtctgtcttaaactctactattcataacttaagatttacttccgatcggacccctaagccattggttatcgtcaccccatctcacgtctcccatatccaaggtactatcttatgttctaagaaggttggtttgcaaatccgtactagatctggtggtcacgactctgaaggtatgtcctatatctctcaagagccatttgtcattgttgacttaagaaatatgagatccattaaaattgatgttcattctcaaactgcttgggtcgaagctggtgccaccttgggtgaagtttactactgggtcaacgaaaaaaacgaaaacttatctttagctgccggttactgtccaaccgtctgtgctggtggtcatttcggtggtggtggttacggtccattgatgcgtaactacggtttagctgctgacaacattattgacgctcatttagttaatgttcacggtaaggttttggacagaaaatctatgggtgaagatttattttgggccttgagaggtggtggtgctgaatccttcggtatcatcgttgcctggaagattcgtttagttgctgtcccttctatgtccaccatgttctccgtcaagaaaatcatggaaattcatgagttggtcaaattggttaacaagtggcaaaacatcgcttacaagtatgacaaggatttgttgttaatgactcacttcatcacccgtaatatcaccgacaaccaaggtaagaacaaaactgctattcacacctacttctcctccgtttttttgggtggtgtcgactccttagtcgatttgatgaacaaatcctttccagaattgggtattaagaaaactgattgtagacaattgtcttggattgacaccattatcttctattctggtgtcgttaactacgacaccgacaactttaacaaggaaattttgttggatcgttctgctggtcaaaatatcgccttcaaaatcaaattggactacgtcaaaaagccaatcccagaacaggttttcgttcaaattttggaaaagttgtacgaagaagacattggtatgggtatgtatgctttgtatccatatggtggtatcatggacgaaattggggaatctgccatcccattcccacacagagctggtattttatatgaattgtggtacatctgttcttgggaaaagcaagaagacaacgaaaagcatttaaactggattagaaacatttacaacttcatgaccccatacgtttctaagaacccaagaggcgcctatttgaactaccgtgacttagatattggtattaatgacccaaagaacccaaacaactatactcaagccagaatttggggtgaaaagtacttcggtaagaacttcgatagattagttaaggttaaaactttggtcgatccaaacaacttcttcagaaacgaacaatccatcccaccattggtcagacatcgtcacggccatcatcaccatcaccattag

SEQ ID NO: 186 - DNA, 1575 bp, Artificial Sequence
  OXC158-I351G/V383A
atgccatgggaaaacttcttgaagtgcttctcccaatatatcccaaacaacgagactaacttaaagttagtttacactcaaaacaatccattatacatgtctgtcttaaactctactattcataacttaagatttacttccgatcggacccctaagccattggttatcgtcaccccatctcacgtctcccatatccaaggtactatcttatgttctaagaaggttggtttgcaaatccgtactagatctggtggtcacgactctgaaggtatgtcctatatctctcaagagccatttgtcattgttgacttaagaaatatgagatccattaaaattgatgttcattctcaaactgcttgggtcgaagctggtgccaccttgggtgaagtttactactgggtcaacgaaaaaaacgaaaacttatctttagctgccggttactgtccaaccgtctgtgctggtggtcatttcggtggtggtggttacggtccattgatgcgtaactacggtttagctgctgacaacattattgacgctcatttagttaatgttcacggtaaggttttggacagaaaatctatgggtgaagatttattttgggccttgagaggtggtggtgctgaatccttcggtatcatcgttgcctggaagattcgtttagttgctgtcccttctaagtccaccatgttctccgtcaagaaaatcatggaaattcatgagttggtcaaattggttaacaagtggcaaaacatcgcttacaagtatgacaaggatttgttgttaatgactcacttcatcacccgtaatatcaccgacaaccaaggtaagaacaaaactgctattcacacctacttctcctccgtttttttgggtggtgtcgactccttagtcgatttgatgaacaaatcctttccagaattgggtattaagaaaactgattgtagacaattgtcttggattgacaccattatcttctattctggtgtcgttaactacgacaccgacaactttaacaaggaaattttgttggatcgttctgctggtcaaaatggtgccttcaaaatcaaattggactacgtcaaaaagccaatcccagaatctgttttcgttcaaattttggaaaagttgtacgaagaagacattggtgcgggtatgtatgctttgtatccatatggtggtatcatggacgaaatttccgaatctgccatcccattcccacacagagctggtattttatatgaattgtggtacatctgttcttgggaaaagcaagaagacaacgaaaagcatttaaactggattagaaacatttacaacttcatgaccccatacgtttctaagaacccaagaggcgcctatttgaactaccgtgacttagatattggtattaatgacccaaagaacccaaacaactatactcaagccagaatttggggtgaaaagtacttcggtaagaacttcgatagattagttaaggttaaaactttggtcgatccaaacaacttcttcagaaacgaacaatccatcccaccattgccaagacatcgtcacggccatcatcaccatcaccattag

SEQ ID NO: 187 - DNA, 1575 bp, Artificial Sequence
  OXC158-W3A/I351G/V383A
atgccagctgaaaacttcttgaagtgcttctcccaatatatcccaaacaacgagactaacttaaagttagtttacactcaaaacaatccattatacatgtctgtcttaaactctactattcataacttaagatttacttccgatcggacccctaagccattggttatcgtcaccccatctcacgtctcccatatccaaggtactatcttatgttctaagaaggttggtttgcaaatccgtactagatctggtggtcacgactctgaaggtatgtcctatatctctcaagagccatttgtcattgttgacttaagaaatatgagatccattaaaattgatgttcattctcaaactgcttgggtcgaagctggtgccaccttgggtgaagtttactactgggtcaacgaaaaaaacgaaaacttatctttagctgccggttactgtccaaccgtctgtgctggtggtcatttcggtggtggtggttacggtccattgatgcgtaactacggtttagctgctgacaacattattgacgctcatttagttaatgttcacggtaaggttttggacagaaaatctatgggtgaagatttattttgggccttgagaggtggtggtgctgaatccttcggtatcatcgttgcctggaagattcgtttagttgctgtcccttctaagtccaccatgttctccgtcaagaaaatcatggaaattcatgagttggtcaaattggttaacaagtggcaaaacatcgcttacaagtatgacaaggatttgttgttaatgactcacttcatcacccgtaatatcaccgacaaccaaggtaagaacaaaactgctattcacacctacttctcctccgtttttttgggtggtgtcgactccttagtcgatttgatgaacaaatcctttccagaattgggtattaagaaaactgattgtagacaattgtcttggattgacaccattatcttctattctggtgtcgttaactacgacaccgacaactttaacaaggaaattttgttggatcgttctgctggtcaaaatggtgccttcaaaatcaaattggactacgtcaaaaagccaatcccagaatctgttttcgttcaaattttggaaaagttgtacgaagaagacattggtgcgggtatgtatgctttgtatccatatggtggtatcatggacgaaatttccgaatctgccatcccattcccacacagagctggtattttatatgaattgtggtacatctgttcttgggaaaagcaagaagacaacgaaaagcatttaaactggattagaaacatttacaacttcatgaccccatacgtttctaagaacccaagaggcgcctatttgaactaccgtgacttagatattggtattaatgacccaaagaacccaaacaactatactcaagccagaatttggggtgaaaagtacttcggtaagaacttcgatagattagttaaggttaaaactttggtcgatccaaacaacttcttcagaaacgaacaatccatcccaccattgccaagacatcgtcacggccatcatcaccatcaccattag

SEQ ID NO: 188 - DNA, 1575 bp, Artificial Sequence
  OXC158-W3A/N5Q/N28E/I351G/S367R/V383A
atgccagctgaacagttcttgaagtgcttctcccaatatatcccaaacaacgagactaacttaaagttagtttacactcaagagaatccattatacatgtctgtcttaaactctactattcataacttaagatttacttccgatcggacccctaagccattggttatcgtcaccccatctcacgtctcccatatccaaggtactatcttatgttctaagaaggttggtttgcaaatccgtactagatctggtggtcacgactctgaaggtatgtcctatatctctcaagagccatttgtcattgttgacttaagaaatatgagatccattaaaattgatgttcattctcaaactgcttgggtcgaagctggtgccaccttgggtgaagtttactactgggtcaacgaaaaaaacgaaaacttatctttagctgccggttactgtccaaccgtctgtgctggtggtcatttcggtggtggtggttacggtccattgatgcgtaactacggtttagctgctgacaacattattgacgctcatttagttaatgttcacggtaaggttttggacagaaaatctatgggtgaagatttattttgggccttgagaggtggtggtgctgaatccttcggtatcatcgttgcctggaagattcgtttagttgctgtcccttctaagtccaccatgttctccgtcaagaaaatcatggaaattcatgagttggtcaaattggttaacaagtggcaaaacatcgcttacaagtatgacaaggatttgttgttaatgactcacttcatcacccgtaatatcaccgacaaccaaggtaagaacaaaactgctattcacacctacttctcctccgtttttttgggtggtgtcgactccttagtcgatttgatgaacaaatcctttccagaattgggtattaagaaaactgattgtagacaattgtcttggattgacaccattatcttctattctggtgtcgttaactacgacaccgacaactttaacaaggaaattttgttggatcgttctgctggtcaaaatggtgccttcaaaatcaaattggactacgtcaaaaagccaatcccagaacgggttttcgttcaaattttggaaaagttgtacgaagaagacattggtgcgggtatgtatgctttgtatccatatggtggtatcatggacgaaatttccgaatctgccatcccattcccacacagagctggtattttatatgaattgtggtacatctgttcttgggaaaagcaagaagacaacgaaaagcatttaaactggattagaaacatttacaacttcatgaccccatacgtttctaagaacccaagaggcgcctatttgaactaccgtgacttagatattggtattaatgacccaaagaacccaaacaactatactcaagccagaatttggggtgaaaagtacttcggtaagaacttcgatagattagttaaggttaaaactttggtcgatccaaacaacttcttcagaaacgaacaatccatcccaccattgccaagacatcgtcacggccatcatcaccatcaccattag

SEQ ID NO: 189 - protein, 524 aa, Artificial Sequence
  OXC158-L31E/V383G
MPWENFLKCFSQYIPNNETNLKLVYTQNNPEYMSVLNSTIHNLRFTSDRTPKPLVIVTPSHVSHIQGTILCSKKVGLQIRTRSGGHDSEGMSYISQEPFVIVDLRNMRSIKIDVHSQTAWVEAGATLGEVYYWVNEKNENLSLAAGYCPTVCAGGHFGGGGYGPLMRNYGLAADNIIDAHLVNVHGKVLDRKSMGEDLFWALRGGGAESFGIIVAWKIRLVAVPSKSTMFSVKKIMEIHELVKLVNKWQNIAYKYDKDLLLMTHFITRNITDNQGKNKTAIHTYFSSVFLGGVDSLVDLMNKSFPELGIKKTDCRQLSWIDTIIFYSGVVNYDTDNFNKEILLDRSAGQNIAFKIKLDYVKKPIPESVFVQILEKLYEEDIGGGMYALYPYGGIMDEISESAIPFPHRAGILYELWYICSWEKQEDNEKHLNWIRNIYNFMTPYVSKNPRGAYLNYRDLDIGINDPKNPNNYTQARIWGEKYFGKNFDRLVKVKTLVDPNNFFRNEQSIPPLPRHRHGHHHHHH

SEQ ID NO: 190 - protein, 524 aa, Artificial Sequence
  OXC158-N138T/V383M/H515E
MPWENFLKCFSQYIPNNETNLKLVYTQNNPLYMSVLNSTIHNLRFTSDRTPKPLVIVTPSHVSHIQGTILCSKKVGLQIRTRSGGHDSEGMSYISQEPFVIVDLRNMRSIKIDVHSQTAWVEAGATLGEVYYWVNEKTENLSLAAGYCPTVCAGGHFGGGGYGPLMRNYGLAADNIIDAHLVNVHGKVLDRKSMGEDLFWALRGGGAESFGIIVAWKIRLVAVPSKSTMFSVKKIMEIHELVKLVNKWQNIAYKYDKDLLLMTHFITRNITDNQGKNKTAIHTYFSSVFLGGVDSLVDLMNKSFPELGIKKTDCRQLSWIDTIIFYSGVVNYDTDNFNKEILLDRSAGQNIAFKIKLDYVKKPIPESVFVQILEKLYEEDIGMGMYALYPYGGIMDEISESAIPFPHRAGILYELWYICSWEKQEDNEKHLNWIRNIYNFMTPYVSKNPRGAYLNYRDLDIGINDPKNPNNYTQARIWGEKYFGKNFDRLVKVKTLVDPNNFFRNEQSIPPLPRERHGHHHHHH

SEQ ID NO: 191 - protein, 524 aa, Artificial Sequence
  OXC158-S367K/V383A/P513V
MPWENFLKCFSQYIPNNETNLKLVYTQNNPLYMSVLNSTIHNLRFTSDRTPKPLVIVTPSHVSHIQGTILCSKKVGLQIRTRSGGHDSEGMSYISQEPFVIVDLRNMRSIKIDVHSQTAWVEAGATLGEVYYWVNEKNENLSLAAGYCPTVCAGGHFGGGGYGPLMRNYGLAADNIIDAHLVNVHGKVLDRKSMGEDLFWALRGGGAESFGIIVAWKIRLVAVPSKSTMFSVKKIMEIHELVKLVNKWQNIAYKYDKDLLLMTHFITRNITDNQGKNKTAIHTYFSSVFLGGVDSLVDLMNKSFPELGIKKTDCRQLSWIDTIIFYSGVVNYDTDNFNKEILLDRSAGQNIAFKIKLDYVKKPIPEKVFVQILEKLYEEDIGAGMYALYPYGGIMDEISESAIPFPHRAGILYELWYICSWEKQEDNEKHLNWIRNIYNFMTPYVSKNPRGAYLNYRDLDIGINDPKNPNNYTQARIWGEKYFGKNFDRLVKVKTLVDPNNFFRNEQSIPPLVRHRHGHHHHHH

SEQ ID NO: 192 - protein, 524 aa, Artificial Sequence; identical to SEQ ID NO: 177
  OXC158-V383A

SEQ ID NO: 193 - protein, 524 aa, Artificial Sequence
  OXC158-W3A/L31E/K226M/S367Q/V383M/S399G/P513V
MPAENFLKCFSQYIPNNETNLKLVYTQNNPEYMSVLNSTIHNLRFTSDRTPKPLVIVTPSHVSHIQGTILCSKKVGLQIRTRSGGHDSEGMSYISQEPFVIVDLRNMRSIKIDVHSQTAWVEAGATLGEVYYWVNEKNENLSLAAGYCPTVCAGGHFGGGGYGPLMRNYGLAADNIIDAHLVNVHGKVLDRKSMGEDLFWALRGGGAESFGIIVAWKIRLVAVPSMSTMFSVKKIMEIHELVKLVNKWQNIAYKYDKDLLLMTHFITRNITDNQGKNKTAIHTYFSSVFLGGVDSLVDLMNKSFPELGIKKTDCRQLSWIDTIIFYSGVVNYDTDNFNKEILLDRSAGQNIAFKIKLDYVKKPIPEQVFVQILEKLYEEDIGMGMYALYPYGGIMDEIGESAIPFPHRAGILYELWYICSWEKQEDNEKHLNWIRNIYNFMTPYVSKNPRGAYLNYRDLDIGINDPKNPNNYTQARIWGEKYFGKNFDRLVKVKTLVDPNNFFRNEQSIPPLVRHRHGHHHHHH

SEQ ID NO: 194 - protein, 524 aa, Artificial Sequence
  OXC158-I351G/V383A
MPWENFLKCFSQYIPNNETNLKLVYTQNNPLYMSVLNSTIHNLRFTSDRTPKPLVIVTPSHVSHIQGTILCSKKVGLQIRTRSGGHDSEGMSYISQEPFVIVDLRNMRSIKIDVHSQTAWVEAGATLGEVYYWVNEKNENLSLAAGYCPTVCAGGHFGGGGYGPLMRNYGLAADNIIDAHLVNVHGKVLDRKSMGEDLFWALRGGGAESFGIIVAWKIRLVAVPSKSTMFSVKKIMEIHELVKLVNKWQNIAYKYDKDLLLMTHFITRNITDNQGKNKTAIHTYFSSVFLGGVDSLVDLMNKSFPELGIKKTDCRQLSWIDTIIFYSGVVNYDTDNFNKEILLDRSAGQNGAFKIKLDYVKKPIPESVFVQILEKLYEEDIGAGMYALYPYGGIMDEISESAIPFPHRAGILYELWYICSWEKQEDNEKHLNWIRNIYNFMTPYVSKNPRGAYLNYRDLDIGINDPKNPNNYTQARIWGEKYFGKNFDRLVKVKTLVDPNNFFRNEQSIPPLPRHRHGHHHHHH

SEQ ID NO: 195 - protein, 524 aa, Artificial Sequence
  OXC158-W3A/I351G/V383A
MPAENFLKCFSQYIPNNETNLKLVYTQNNPLYMSVLNSTIHNLRFTSDRTPKPLVIVTPSHVSHIQGTILCSKKVGLQIRTRSGGHDSEGMSYISQEPFVIVDLRNMRSIKIDVHSQTAWVEAGATLGEVYYWVNEKNENLSLAAGYCPTVCAGGHFGGGGYGPLMRNYGLAADNIIDAHLVNVHGKVLDRKSMGEDLFWALRGGGAESFGIIVAWKIRLVAVPSKSTMFSVKKIMEIHELVKLVNKWQNIAYKYDKDLLLMTHFITRNITDNQGKNKTAIHTYFSSVFLGGVDSLVDLMNKSFPELGIKKTDCRQLSWIDTIIFYSGVVNYDTDNFNKEILLDRSAGQNGAFKIKLDYVKKPIPESVFVQILEKLYEEDIGAGMYALYPYGGIMDEISESAIPFPHRAGILYELWYICSWEKQEDNEKHLNWIRNIYNFMTPYVSKNPRGAYLNYRDLDIGINDPKNPNNYTQARIWGEKYFGKNFDRLVKVKTLVDPNNFFRNEQSIPPLPRHRHGHHHHHH

SEQ ID NO: 196 - protein, 524 aa, Artificial Sequence
  OXC158-W3A/N5Q/N28E/I351G/S367R/V383A
MPAEQFLKCFSQYIPNNETNLKLVYTQENPLYMSVLNSTIHNLRFTSDRTPKPLVIVTPSHVSHIQGTILCSKKVGLQIRTRSGGHDSEGMSYISQEPFVIVDLRNMRSIKIDVHSQTAWVEAGATLGEVYYWVNEKNENLSLAAGYCPTVCAGGHFGGGGYGPLMRNYGLAADNIIDAHLVNVHGKVLDRKSMGEDLFWALRGGGAESFGIIVAWKIRLVAVPSKSTMFSVKKIMEIHELVKLVNKWQNIAYKYDKDLLLMTHFITRNITDNQGKNKTAIHTYFSSVFLGGVDSLVDLMNKSFPELGIKKTDCRQLSWIDTIIFYSGVVNYDTDNFNKEILLDRSAGQNGAFKIKLDYVKKPIPERVFVQILEKLYEEDIGAGMYALYPYGGIMDEISESAIPFPHRAGILYELWYICSWEKQEDNEKHLNWIRNIYNFMTPYVSKNPRGAYLNYRDLDIGINDPKNPNNYTQARIWGEKYFGKNFDRLVKVKTLVDPNNFFRNEQSIPPLPRHRHGHHHHHH

SEQ ID NO: 197 - DNA, 9706 bp, Artificial Sequence
  SEQ ID NO: 197 pCAS(G418)-GRN248
tgagcaaaaggccagcaaaaggccaggaaccgtaaaaaggccgcgttgctggcgtttttccataggctccgcccccctgacgagcatcacaaaaatcgacgctcaagtcagaggtggcgaaacccgacaggactataaagataccaggcgtttccccctggaagctccctcgtgcgctctcctgttccgaccctgccgcttaccggatacctgtccgcctttctcccttcgggaagcgtggcgctttctcatagctcacgctgtaggtatctcagttcggtgtaggtcgttcgctccaagctgggctgtgtgcacgaaccccccgttcagcccgaccgctgcgccttatccggtaactatcgtcttgagtccaacccggtaagacacgacttatcgccactggcagcagccactggtaacaggattagcagagcgaggtatgtaggcggtgctacagagttcttgaagtggtggcctaactacggctacactagaaggacagtatttggtatctgcgctctgctgaagccagttaccttcggaaaaagagttggtagctcttgatccggcaaacaaaccaccgctggtagcggtggtttttttgtttgcaagcagcagattacgcgcagaaaaaaaggatctcaagaagatcctttgatcttttctacactagtcgaagcatctgtgcttcattttgtagaacaaaaatgcaacgcgagagcgctaatttttcaaacaaagaatctgagctgcatttttacagaacagaaatgcaacgcgaaagcgctattttaccaacgaagaatctgtgcttcatttttgtaaaacaaaaatgcaacgcgagagcgctaatttttcaaacaaagaatctgagctgcatttttacagaacagaaatgcaacgcgagagcgctattttaccaacaaagaatctatacttcttttttgttctacaaaaatgcatcccgagagcgctatttttctaacaaagcatcttagattactttttttctcctttgtgcgctctataatgcagtctcttgataactttttgcactgtaggtccgttaaggttagaagaaggctactttggtgtctattttctcttccataaaaaaagcctgactccacttcccgcgtttactgattactagcgaagctgcgggtgcattttttcaagataaaggcatccccgattatattctataccgatgtggattgcgcatactttgtgaacagaaagtgatagcgttgatgattcttcattggtcagaaaattatgaacggtttcttctattttgtctctatatactacgtataggaaatgtttacattttcgtattgttttcgattcactctatgaatagttcttactacaatttttttgtctaaagagtaatactagagataaacataaaaaatgtagaggtcgagtttagatgcaagttcaaggagcgaaaggtggatgggtaggttatatagggatatagcacagagatatatagcaaagagatacttttgagcaatgtttgtggaagcggtattcgcaatattttagtagctcgttacagtccggtgcgtttttggttttttgaaagtgcgtcttcagagcgcttttggttttcaaaagcgctctgaagttcctatactttctagagaataggaacttcggaataggaacttcaaagcgtttccgaaaacgagcgcttccgaaaatgcaacgcgagctgcgcacatacagctcactgttcacgtcgcacctatatctgcgtgttgcctgtatatatatatacatgagaagaacggcatagtgcgtgtttatgcttaaatgcgtatatgtgttatgtagtatactctttcttcaacaattaaatactctcggtagccaagttggtttaaggcgcaagactgtaatttatcactacgaaatcttgagatcgggcgttcgactcgcccccgggagagatggccggcatggtcccagcctcctcgctggcgccggctgggcaacaccttcgggtggcgaatgggactttgtagcccaacaggagcacatgttttagagctagaaatagcaagttaaaataaggctagtccgttatcaacttgaaaaagtggcaccgagtcggtgctttttttattttttgtcactattgttatgtaaaatgccacctctgacagtatggaacgcaaacttctgtctagtggatataggtctagagatctgtttcgcggaacccctatttgtttatttttctaaatacattcaaatatgtatccgctcatgagacaataaccctgataaatgcttcaataatattgaaaaaggaagagtatgagtattcaacatttccgtgtcgcccttattcccttttttgcggcattttgccttcctgtttttgctcacccagaaacgctggtgaaagtaaaagatgctgaagatcagttgggtgcacgagtgggttacatcgaactggatctcaacagcggtaagatccttgagagttttcgccccgaagaacgttttccaatgatgagcacttttaaagttctgctatgtggcgcggtattatcccgtattgacgccgggcaagagcaactcggtcgccgcatacactattctcagaatgacttggttgagtactcaccagtcacagaaaagcatcttacggatggcatgacagtaagagaattatgcagtgctgccataaccatgagtgataacactgcggccaacttacttctgacaacgatcggaggaccgaaggagctaaccgcttttttgcacaacatgggggatcatgtaactcgccttgatcgttgggaaccggagctgaatgaagccataccaaacgacgagcgtgacaccacgatgcctgtagcaatggcaacaacgttgcgcaaactattaactggcgaactacttactctagcttcccggcaacaattaatagactggatggaggcggataaagttgcaggaccacttctgcgctcggcccttccggctggctggtttattgctgataaatctggagccggtgagcgtgggtcccgcggtatcattgcagcactggggccagatggtaagccctcccgtatcgtagttatctacacgacggggagtcaggcaactatggatgaacgaaatagacagatcgctgagataggtgcctcactgattaagcattggtaactgtcagaccaagtttactcatatatactttagattgatttaaaacttcatttttaatttaaaaggatctaggtgaagatcctttttgataatctcatgaccaaaatcccttaacgtgagttttcgttccactgagcgtcagaccccgtagaaaagatcaaaggatcttcagcttgcctcgtccccgccgggtcacccggccagcgacatggaggcccagaataccctccttgacagtcttgacgtgcgcagctcaggggcatgatgtgactgtcgcccgtacatttagcccatacatccccatgtataatcatttgcatccatacattttgatggccgcacggcgcgaagcaaaaattacggctcctcgctgcagacctgcgagcagggaaacgctcccctcacagacgcgttgaattgtccccacgccgcgcccctgtagagaaatataaaaggttaggatttgccactgaggttcttctttcatatacttccttttaaaatcttgctaggatacagttctcacatcacatccgaacataaacaaccatgggtaaggaaaagactcacgtttcgaggccgcgattaaattccaacatggatgctgatttatatgggtataaatgggctcgcgataatgtcgggcaatcaggtgcgacaatctatcgattgtatgggaagcccgatgcgccagagttgtttctgaaacatggcaaaggtagcgttgccaatgatgttacagatgagatggtcagactaaactggctgacggaatttatgcctcttccgaccatcaagcattttatccgtactcctgatgatgcatggttactcaccactgcgatccccggcaaaacagcattccaggtattagaagaatatcctgattcaggtgaaaatattgttgatgcgctggcagtgttcctgcgccggttgcattcgattcctgtttgtaattgtccttttaacagcgatcgcgtatttcgtctcgctcaggcgcaatcacgaatgaataacggtttggttgatgcgagtgattttgatgacgagcgtaatggctggcctgttgaacaagtctggaaagaaatgcataagcttttgccattctcaccggattcagtcgtcactcatggtgatttctcacttgataaccttatttttgacgaggggaaattaataggttgtattgatgttggacgagtcggaatcgcagaccgataccaggatcttgccatcctatggaactgcctcggtgagttttctccttcattacagaaacggctttttcaaaaatatggtattgataatcctgatatgaataaattgcagtttcatttgatgctcgatgagtttttctaatcagtactgacaataaaaagattcttgttttcaagaacttgtcatttgtatagtttttttatattgtagttgttctattttaatcaaatgttagcgtgatttatattttttttcgcctcgacatcatctgcccagatgcgaagttaagtgcgcagaaagtaatatcatgcgtcaatcgtatgtgaatgctggtcgctatactgctgtcgattcgatactaacgccgccatccagtgtcgaaaacgagctctcgagaacccttaatcatagcttcaaaatgtttctactccttttttactcttccagattttctcggactccgcgcatcgccgtaccacttcaaaacacccaagcacagcatactaaatttcccctctttcttcctctagggtgtcgttaattacccgtactaaaggtttggaaaagaaaaaagaggccgcctcgtttctttttcttcgtcgaaaaaggcaataaaaatttttatcacgtttctttttcttgaaaatttttttttttgatttttttctctttcgatgacctcccattgatatttaagttaataaacggtcttcaatttctcaagtttcagtttcatttttcttgttctattacaactttttttacttcttgctcattagaaagaaagcatagcaatctaatctaagttttctagatggattataaagatgacgatgacaaacctccaaaaaagaagagaaaggtcgataagaaatactcaataggcttagatatcggcacaaatagcgtcggatgggcggtgatcactgatgaatataaggttccgtctaaaaagttcaaggttctgggaaatacagaccgccacagtatcaaaaaaaatcttataggggctcttttatttgacagtggagagacagcggaagcgactcgtctcaaacggacagctcgtagaaggtatacacgtcggaagaatcgtatttgttatctacaggagattttttcaaatgagatggcgaaagtagatgatagtttctttcatcgacttgaagagtcttttttggtggaagaagacaagaagcatgaacgtcatcctatttttggaaatatagtagatgaagttgcttatcatgagaaatatccaactatctatcatctgcgaaaaaaattggtagattctacttataaagcggatttgcgcttaatctatttggccttagcgcatatgattaagtttcgtggtcattttttgattgagggagatttaaatcctgataatagtgatgtggacaaactatttatccagttggtacaaacctacaatcaattatttgaagaaaaccctattaacgcaagtggagtagatgctaaagcgattctttctgcacgattgagtaaatcaagacgattagaaaatctcattgctcagctccccggtgagaagaaaaatggcttatttgggaatctcattgctttgtcattgggtttgacccctaattttaaatcaaattttgatttggcagaagatgctaaattacagctttcaaaagatacttacgatgatgatttagataatttattggcgcaaattggagatcaatatgctgatttgtttttggcagctaagaatttatcagatgctattttactttcagatatcctaagagtaaatactgaaataactaaggctcccctatcagcttcaatgattaaacgctacgatgaacatcatcaagacttgactcttttaaaagctttagttcgacaacaacttccagaaaagtataaagaaatcttttttgatcaatcaaaaaacggatatgcaggttatattgatgggggagctagccaagaagaattttataaatttatcaaaccaattttagaaaaaatggatggtactgaggaattattggtgaaactaaatcgtgaagatttgctgcgcaagcaacggacctttgacaacggctctattacccatcaaattcacttgggtgagctgcatgctattttgagaagacaagaagacttttatccatttttaaaagacaatcgtgagaagattgaaaaaatcttgacttttcgaattccttattatgttggtccattggcgcgtggcaatagtcgttttgcatggatgactcggaagtctgaagaaacaattaccccatggaattttgaagaagttgtcgataaaggtgcttcagctcaatcatttattgaacgcatgacaaactttgataaaaatcttccaaatgaaaaagtactaccaaaacatagtttgctttatgagtattttacggtttataacgaattgacaaaggtcaaatatgttactgaaggaatgcgaaaaccagcatttctttcaggtgaacagaagaaagccattgttgatttactcttcaaaacaaatcgaaaagtaaccgttaagcaattaaaagaagattatttcaaaaaaatagaatgttttgatagtgttgaaatttcaggagttgaagatagatttaatgcttcattaggtacctaccatgatttgctaaaaattattaaagataaagattttttggataatgaagaaaatgaagatatcttagaggatattgttttaacattgaccttatttgaagatagggagatgattgaggaaagacttaaaacatatgctcacctctttgatgataaggtgatgaaacagcttaaacgtcgccgttatactggttggggacgtttgtctcgaaaattgattaatggtattagggataagcaatctggcaaaacaatattagattttttgaaatcagatggttttgccaatcgcaattttatgcagctgatccatgatgatagtttgacatttaaagaagacattcaaaaagcacaagtgtctggacaaggcgatagtttacatgaacatattgcaaatttagctggtagccctgctattaaaaaaggtattttacagactgtaaaagttgttgatgaattggtcaaagtaatggggcggcataagccagaaaatatcgttattgaaatggcacgtgaaaatcagacaactcaaaagggccagaaaaattcgcgagagcgtatgaaacgaatcgaagaaggtatcaaagaattaggaagtcagattcttaaagagcatcctgttgaaaatactcaattgcaaaatgaaaagctctatctctattatctccaaaatggaagagacatgtatgtggaccaagaattagatattaatcgtttaagtgattatgatgtcgatcacattgttccacaaagtttccttaaagacgattcaatagacaataaggtcttaacgcgttctgataaaaatcgtggtaaatcggataacgttccaagtgaagaagtagtcaaaaagatgaaaaactattggagacaacttctaaacgccaagttaatcactcaacgtaagtttgataatttaacgaaagctgaacgtggaggtttgagtgaacttgataaagctggttttatcaaacgccaattggttgaaactcgccaaatcactaagcatgtggcacaaattttggatagtcgcatgaatactaaatacgatgaaaatgataaacttattcgagaggttaaagtgattaccttaaaatctaaattagtttctgacttccgaaaagatttccaattctataaagtacgtgagattaacaattaccatcatgcccatgatgcgtatctaaatgccgtcgttggaactgctttgattaagaaatatccaaaacttgaatcggagtttgtctatggtgattataaagtttatgatgttcgtaaaatgattgctaagtctgagcaagaaataggcaaagcaaccgcaaaatatttcttttactctaatatcatgaacttcttcaaaacagaaattacacttgcaaatggagagattcgcaaacgccctctaatcgaaactaatggggaaactggagaaattgtctgggataaagggcgagattttgccacagtgcgcaaagtattgtccatgccccaagtcaatattgtcaagaaaacagaagtacagacaggcggattctccaaggagtcaattttaccaaaaagaaattcggacaagcttattgctcgtaaaaaagactgggatccaaaaaaatatggtggttttgatagtccaacggtagcttattcagtcctagtggttgctaaggtggaaaaagggaaatcgaagaagttaaaatccgttaaagagttactagggatcacaattatggaaagaagttcctttgaaaaaaatccgattgactttttagaagctaaaggatataaggaagttaaaaaagacttaatcattaaactacctaaatatagtctttttgagttagaaaacggtcgtaaacggatgctggctagtgccggagaattacaaaaaggaaatgagctggctctgccaagcaaatatgtgaattttttatatttagctagtcattatgaaaagttgaagggtagtccagaagataacgaacaaaaacaattgtttgtggagcagcataagcattatttagatgagattattgagcaaatcagtgaattttctaagcgtgttattttagcagatgccaatttagataaagttcttagtgcatataacaaacatagagacaaaccaatacgtgaacaagcagaaaatattattcatttatttacgttgacgaatcttggagctcccgctgcttttaaatattttgatacaacaattgatcgtaaacgatatacgtctacaaaagaagttttagatgccactcttatccatcaatccatcactggtctttatgaaacacgcattgatttgagtcagctaggaggtgaccctccaaaaaagaagagaaaggtctgagcggatctcttatgtctttacgatttatagttttcattatcaagtatgcctatattagtatatagcatctttagatgacagtgttcgaagtttcacgaataaaagataatattctactttttgctcccaccgcgtttgctagcacgagtgaacaccatccctcgcctgtgagttgtacccattcctctaaactgtagacatggtagcttcagcagtgttcgttatgtacggcatcctccaacaaacagtcggttatagtttgtcctgctcctctgaatcgagtccctcgatatttctcat

SEQ ID NO: 198 - DNA, 3690 bp, Artificial Sequence
  SEQ ID NO. 198 pSmGAL2:OXC158
ctgcagtagaatcagtggaaggagaatgcgccttaatgggtagtgcttgacacgcagcaggccagataagaaccgcctgtgaagtttagatgatattcgctgaagcataactaattagtttatttgtgtgaaggaatagtgacgttgtgatgcggtgagttcggcggttaggggaatggtatatgataaaaaacggaaacgtgcttctttaatttaattgtttaatattgttgcagatatataaaaagggggaaagaaccaaagatgtaattatttctttattgcctcaacctaaagcaagcaataaggtatagagatcaggacgtctcgagagctgatatcaaatttgaagccacgcaagtaactacgtaggtcagagggcacaaggaataacacgtgacattacggatcagaggagttctccagatctgaatcacgatgatttcggaaaacacagggcaaagagaaacaaggtagccgcactcaattcatcttttagtgactacttttcatcgaaatccaattaaatgcagtagaatctgttcaaaaaaatgtacatagtgtcaattcggcaagctttcttccggaatggcttaaccagaccatatatctcttcattattttcattttaaggtccggagtattgatcacgtgatcaaattcccattgaagggttgccttttaaaggcaccggtagtcactcatccgtgcggagtgttctgcgccattcaggggccaatgtgcctttgagaagattagagcagggagcagactcggggcggaccactccgagccgatgttagttaagccttcccatcttgaaataggaacaaaatggctttatactcctgccagaaagcaaggcatgtgtataccttctcaagaatatacaacgttttggcagctattgttcagaagagggatagatcgtaagctaaaatttggagaaattaaagatttgtagacatatataaactatcagcaattcactgctaaaatacatcttgagagtaactcttcgcttattcatcttgttcacttttcgatgaagaaaaccactgttaagtaaaataaagaataacatataaaaaactttttcataatgaggcaggtttggttctcttggattgtgggattgttcctatgttttttcaacgtgtcttctgctgctccagtcaacactacaacagaagatgaaacggcacaaattccggctgaagctgtcatcggttactcagatttagaaggggatttcgatgttgctgttttgccattttccaacagcacaaataacgggttattgtttataaatactactattgccagcattgctgctaaagaagaaggggtatctctcgagaaaagagaggctgaagctatgccatgggaaaacttcttgaagtgcttctcccaatatatcccaaacaacgagactaacttaaagttagtttacactcaaaacaatccattatacatgtctgtcttaaactctactattcataacttaagatttacttccgatcggacccctaagccattggttatcgtcaccccatctcacgtctcccatatccaaggtactatcttatgttctaagaaggttggtttgcaaatccgtactagatctggtggtcacgactctgaaggtatgtcctatatctctcaagagccatttgtcattgttgacttaagaaatatgagatccattaaaattgatgttcattctcaaactgcttgggtcgaagctggtgccaccttgggtgaagtttactactgggtcaacgaaaaaaacgaaaacttatctttagctgccggttactgtccaaccgtctgtgctggtggtcatttcggtggtggtggttacggtccattgatgcgtaactacggtttagctgctgacaacattattgacgctcatttagttaatgttcacggtaaggttttggacagaaaatctatgggtgaagatttattttgggccttgagaggtggtggtgctgaatccttcggtatcatcgttgcctggaagattcgtttagttgctgtcccttctaagtccaccatgttctccgtcaagaaaatcatggaaattcatgagttggtcaaattggttaacaagtggcaaaacatcgcttacaagtatgacaaggatttgttgttaatgactcacttcatcacccgtaatatcaccgacaaccaaggtaagaacaaaactgctattcacacctacttctcctccgtttttttgggtggtgtcgactccttagtcgatttgatgaacaaatcctttccagaattgggtattaagaaaactgattgtagacaattgtcttggattgacaccattatcttctattctggtgtcgttaactacgacaccgacaactttaacaaggaaattttgttggatcgttctgctggtcaaaatatcgccttcaaaatcaaattggactacgtcaaaaagccaatcccagaatctgttttcgttcaaattttggaaaagttgtacgaagaagacattggtgtgggtatgtatgctttgtatccatatggtggtatcatggacgaaatttccgaatctgccatcccattcccacacagagctggtattttatatgaattgtggtacatctgttcttgggaaaagcaagaagacaacgaaaagcatttaaactggattagaaacatttacaacttcatgaccccatacgtttctaagaacccaagaggcgcctatttgaactaccgtgacttagatattggtattaatgacccaaagaacccaaacaactatactcaagccagaatttggggtgaaaagtacttcggtaagaacttcgatagattagttaaggttaaaactttggtcgatccaaacaacttcttcagaaacgaacaatccatcccaccattgccaagacatcgtcacggccatcatcaccatcaccattagctcgagcatgcatctagagggccgcatcatgtaattagttatgtcacgcttacattcacgccctccccccacatccgctctaaccgaaaaggaaggagttagacaacctgaagtctaggtccctatttatttttttatagttatgttagtattaagaacgttatttatatttcaaatttttcttttttttctgtacagacgcgtgtacgcatgtaacattatactgaaaaccttgcttgagaaggttttgggacgctcgaaggctttaatttgccgtatgttactgtttctggtagttgatatgaagttggagttgtatattgtacgctttaggaacagggaagtgaatattatttactctgctgcacattctggctaggtcgaagccggaacttgagaagacgccgcgctagaactatggaccaagctgttgacaatgttcagatggtgatgcactaccctgtgcggggagtggccacggacgcgagcggaaggtgcggaaggtgcggaaggtgcgggagttgcgggaggttcttcgctaagcgtgagggttgctagctggggcggcggggtttccctaagtgtaaataaggcctcggctggcacatgagtcgccggaggaggcggcggaggcgacgacgctaaaaccgtggccgttggggaaggatgggcggctatatctaccattgacctgatggggactcggttcttaaggaatgggtttgaggtgggtgtgg

SEQ ID NO: 199 - DNA, 8989 bp, Artificial Sequence
  SEQ ID NO. 199 pACC1::pPGK1:ACC1
gcgcatgcatcgacgtcacagtgagctcaggccgcatcacggccgttacgccctccagagtcaccacgactgcgactagtatcatccgtcaagaagaacaagaacaagaacaagaacaagaacaacaaactccgggcacatctctcggcttcagtcgctttcgctcattgcctgtaggttggcccgatatgcgttgacgttatccaaaggggaatgcttcatcttgttgaacaacgcccaacaatttccactgcccaccgaatcgttgcgcccgttaaaatcttcacatggcccggccgcgcgcgcgttgtgccaacaagtcgcagtcgaaattcaaccgctcattgccactctctctactgcttggtgaactaggctatacgctcaatcagcgccaagatatataagaagaacagcactcccagtcgtattctggcacagtatagcctagcacaatcactgtcacaattgttatcggttctacaattgttctgctctcttcaattttcctttccttattctactctttttatccctacgcacagatattataacatctgcataataggcatttgcaagaattactcgtgagtaaggaaagagtgaggaactatcgcatacctgcatttaaagatgccgatttgggcgcgaatcctttattttggcttcaccctcatactattatcagggccagaaaaaggaagtgtttccctccttcttgaattgatgttaccctcataaagcacgtggcctcttatcgagaaagaaattaccgtcgctcgtgatttgtttgcaaaaagaacaaaactgaaaaaacccagacacgctcgacttcctgtcttcctattgattgcagcttccaatttcgtcacacaacaaggtcctagcgacggctcacaggttttgtaacaagcaatcgaaggttctggaatggcgggaaagggtttagtaccacatgctatgatgcccactgtgatctccagagcaaagttcgttcgatcgtactgttactctctctctttcaaacagaattgtccgaatcgtgtgacaacaacagcctgttctcacacactcttttcttctaaccaagggggtggtttagtttagtagaacctcgtgaaacttacatttacatatatataaacttgcataaattggtcaatgcaagaaatacatatttggtcttttctaattcgtagtttttcaagttcttagatgctttctttttctcttttttacagatcatcaaggaagtaattatctactttttacaacaaatataaaacaatgagcgaagaaagcttattcgagtcttctccacagaagatggagtacgaaattacaaactactcagaaagacatacagaacttccaggtcatttcattggcctcaatacagtagataaactagaggagtccccgttaagggactttgttaagagtcacggtggtcacacggtcatatccaagatcctgatagcaaataatggtattgccgccgtgaaagaaattagatccgtcagaaaatgggcatacgagacgttcggcgatgacagaaccgtccaattcgtcgccatggccaccccagaagatctggaggccaacgcagaatatatccgtatggccgatcaatacattgaagtgccaggtggtactaataataacaactacgctaacgtagacttgatcgtagacatcgccgaaagagcagacgtagacgccgtatgggctggctggggtcacgcctccgagaatccactattgcctgaaaaattgtcccagtctaagaggaaagtcatctttattgggcctccaggtaacgccatgaggtctttaggtgataaaatctcctctaccattgtcgctcaaagtgctaaagtcccatgtattccatggtctggtaccggtgttgacaccgttcacgtggacgagaaaaccggtctggtctctgtcgacgatgacatctatcaaaagggttgttgtacctctcctgaagatggtttacaaaaggccaagcgtattggttttcctgtcatgattaaggcatccgaaggtggtggtggtaaaggtatcagacaagttgaacgtgaagaagatttcatcgctttataccaccaggcagccaacgaaattccaggctcccccattttcatcatgaagttggccggtagagcgcgtcacttggaagttcaactgctagcagatcagtacggtacaaatatttccttgttcggtagagactgttccgttcagagacgtcatcaaaaaattatcgaagaagcaccagttacaattgccaaggctgaaacatttcacgagatggaaaaggctgccgtcagactggggaaactagtcggttatgtctctgccggtaccgtggagtatctatattctcatgatgatggaaaattctactttttagaattgaacccaagattacaagtcgagcatccaacaacggaaatggtctccggtgttaacttacctgcagctcaattacaaatcgctatgggtatccctatgcatagaataagtgacattagaactttatatggtatgaatcctcattctgcctcagaaatcgatttcgaattcaaaactcaagatgccaccaagaaacaaagaagacctattccaaagggtcattgtaccgcttgtcgtatcacatcagaagatccaaacgatggattcaagccatcgggtggtactttgcatgaactaaacttccgttcttcctctaatgtttggggttacttctccgtgggtaacaatggtaatattcactccttttcggactctcagttcggccatatttttgcttttggtgaaaatagacaagcttccaggaaacacatggttgttgccctgaaggaattgtccattaggggtgatttcagaactactgtggaatacttgatcaaacttttggaaactgaagatttcgaggataacactattaccaccggttggttggacgatttgattactcataaaatgaccgctgaaaagcctgatccaactcttgccgtcatttgcggtgccgctacaaaggctttcttagcatctgaagaagcccgccacaagtatatcgaatccttacaaaagggacaagttctatctaaagacctactgcaaactatgttccctgtagattttatccatgagggtaaaagatacaagttcaccgtagctaaatccggtaatgaccgttacacattatttatcaatggttctaaatgtgatatcatactgcgtcaactatctgatggtggtcttttgattgccataggcggtaaatcgcataccatctattggaaagaagaagttgctgctacaagattatccgttgactctatgactactttgttggaagttgaaaacgatccaacccagttgcgtactccatcccctggtaaattggttaaattcttggtggaaaatggtgaacacattatcaagggccaaccatatgcagaaattgaagttatgaaaatgcaaatgcctttggtttctcaagaaaatggtatcgtccagttattaaagcaacctggttctaccattgttgcaggtgatatcatggctattatgactcttgacgatccatccaaggtcaagcacgctctaccatttgaaggtatgctgccagattttggttctccagttatcgaaggaaccaaacctgcctataaattcaagtcattagtgtctactttggaaaacattttgaagggttatgacaaccaagttattatgaacgcttccttgcaacaattgatagaggttttgagaaatccaaaactgccttactcagaatggaaactacacatctctgctttacattcaagattgcctgctaagctagatgaacaaatggaagagttagttgcacgttctttgagacgtggtgctgttttcccagctagacaattaagtaaattgattgatatggccgtgaagaatcctgaatacaaccccgacaaattgctgggcgccgtcgtggaaccattggcggatattgctcataagtactctaacgggttagaagcccatgaacattctatatttgtccatttcttggaagaatattacgaagttgaaaagttattcaatggtccaaatgttcgtgaggaaaatatcattctgaaattgcgtgatgaaaaccctaaagatctagataaagttgcgctaactgttttgtctcattcgaaagtttcagcgaagaataacctgatcctagctatcttgaaacattatcaaccattgtgcaagttatcttctaaagtttctgccattttctctactcctctacaacatattgttgaactagaatctaaggctaccgctaaggtcgctctacaagcaagagaaattttgattcaaggcgctttaccttcggtcaaggaaagaactgaacaaattgaacatatcttaaaatcctctgttgtgaaggttgcctatggctcatccaatccaaagcgctctgaaccagatttgaatatcttgaaggacttgatcgattctaattacgttgtgttcgatgttttacttcaattcctaacccatcaagacccagttgtgactgctgcagctgctcaagtctatattcgtcgtgcttatcgtgcttacaccataggagatattagagttcacgaaggtgtcacagttccaattgttgaatggaaattccaactaccttcagctgcgttctccacctttccaactgttaaatctaaaatgggtatgaacagggctgtttctgtttcagatttgtcatatgttgcaaacagtcagtcatctccgttaagagaaggtattttgatggctgtggatcatttagatgatgttgatgaaattttgtcacaaagtttggaagttattcctcgtcaccaatcttcttctaacggacctgctcctgatcgttctggtagctccgcatcgttgagtaatgttgctaatgtttgtgttgcttctacagaaggtttcgaatctgaagaggaaattttggtaaggttgagagaaattttggatttgaataagcaggaattaatcaatgcttctatccgtcgtatcacatttatgttcggttttaaagatgggtcttatccaaagtattatacttttaacggtccaaattataacgaaaatgaaacaattcgtcacattgagccggctttggccttccaactggaattaggaagattgtccaacttcaacattaaaccaattttcactgataatagaaacatccatgtctacgaagctgttagtaagacttctccattggataagagattctttacaagaggtattattagaacgggtcatatccgtgatgacatttctattcaagaatatctgacttctgaagctaacagattgatgagtgatatattggataatttagaagtcaccgacacttcaaattctgatttgaatcatatcttcatcaacttcattgcggtgtttgatatctctccagaagatgtcgaagccgccttcggtggtttcttagaaagatttggtaagagattgttgagattgcgtgtttcttctgccgaaattagaatcatcatcaaagatcctcaaacaggtgccccagtaccattgcgtgccttgatcaataacgtttctggttatgttatcaaaacagaaatgtacaccgaagtcaagaacgcaaaaggtgaatgggtatttaagtctttgggtaaacctggatccatgcatttaagacctattgctactccttaccctgttaaggaatggttgcaaccaaaacgttataaggcacacttgatgggtaccacatatgtctatgacttcccagaattattccgccaagcatcgtcatcccaatggaaaaatttctctgcagatgttaagttaacagatgatttctttatttccaacgagttgattgaagatgaaaacggcgaattaactgaggtggaaagagaacctggtgccaacgctattggtatggttgcctttaagattactgtaaagactcctgaatatccaagaggccgtcaatttgttgttgttgctaacgatatcacattcaagatcggttcctttggtccacaagaagacgaattcttcaataaggttactgaatatgctagaaagcgtggtatcccaagaatttacttggctgcaaactcaggtgccagaattggtatggctgaagagattgttccactatttcaagttgcatggaatgatgctgccaatccggacaagggcttccaatacttatacttaacaagtgaaggtatggaaactttaaagaaatttgacaaagaaaattctgttctcactgaacgtactgttataaacggtgaagaaagatttgtcatcaagacaattattggttctgaagatgggttaggtgtcgaatgtctacgtggatctggtttaattgctggtgcaacgtcaagggcttaccacgatatcttcactatcaccttagtcacttgtagatccgtcggtatcggtgcttatttggttcgtttgggtcaaagagctattcaggtcgaaggccagccaattattttaactggtgctcctgcaatcaacaaaatgctgggtagagaagtttatacttctaacttacaattgggtggtactcaaatcatgtataacaacggtgtttcacatttgactgctgttgacgatttagctggtgtagagaagattgttgaatggatgtcttatgttccagccaagcgtaatatgccagttcctatcttggaaactaaagacacatgggatagaccagttgatttcactccaactaatgatgaaacttacgatgtaagatggatgattgaaggtcgtgagactgaaagtggatttgaatatggtttgtttgataaagggtctttctttgaaactttgtcaggatgggccaaaggtgttgtcgttggtagagcccgtcttggtggtattccactgggtgttattggtgttgaaacaagaactgtcgagaacttgattcctgctgatccagctaatccaaatagtgctgaaacattaattcaagaacctggtcaagtttggcatccaaactccgccttcaagactgctcaagctatcaatgactttaacaacggtgaacaattgccaatgatgattttggccaactggagaggtttctctggtggtcaacgtgatatgttcaacgaagtcttgaagtatggttcgtttattgttgacgcattggtggattacaaacaaccaattattatctatatcccacctaccggtgaactaagaggtggttcatgggttgttgtcgatccaactatcaacgctgaccaaatggaaatgtatgccgacgtcaacgctagagctggtgttttggaaccacaaggtatggttggtatcaagttccgtagagaaaaattgctggacaccatgaacagattggatgacaagtacagagaattgagatctcaattatccaacaagagtttggctccagaagtacatcagcaaatatccaagcaattagctgatcgtgagagagaactattgccaatttacggacaaatcagtcttcaatttgctgatttgcacgataggtcttcacgtatggtggccaagggtgttatttctaaggaactggaatggaccgaggcacgtcgtttcttcttctggagattgagaagaagattgaacgaagaatatttgattaaaaggttgagccatcaggtaggcgaagcatcaagattagaaaagatcgcaagaattagatcgtggtaccctgcttcagtggaccatgaagatgataggcaagtcgcaacatggattgaagaaaactacaaaactttggacgataaactaaagggtttgaaattagagtcattcgctcaagacttagctaaaaagatcagaagcgaccatgacaatgctattgatggattatctgaagttatcaagatgttatctaccgatgataaagaaaaattgttgaagactttgaaataaaccttgtaaagtaaaaaaaaaaaatagtattgatgtaatttaatttagttgctaatataaattagaaaatacatacatatatatattatgcgcgttttctttcataatccgttctttttacttagaatatattatatatctgtgggaaggggtacaaccttttgctttttagtgtcactgcctatgtgatcggtctgtttcctcttttgcttggcgatggcgttggcgtttttcaaagctttttcttgagctctgcagttttccaagtactctgaaggatctgtttgagcgcttccatcatcgttcaattgctttagtacgaaactaacttcttccgggctcttgcaacgggcaaagtactgaaaaaagactgattttccggggacaattctgcttaacatgtattttgtattgccgatgtggttgtcaaacttcgttgcccactgaataaactcgcgacaagcaacgacccaagatggaccgtcttctgaaggcttagaagtgtgatcaaaaactgtagggtcccgttcagcacactctgcaatcataccaccaatgttagtgtttttccaatgattcgcttgtaaatcatgaaaatgagagcggtcgcggatagcgccgttcacaatcaacgacacgttatttgcctggcatatctcgtagatctccgcaatgtaatctgtgatgggctgctctctgtttctcatttcagtcttcctgcagtgaactgtaagatttgtgatgcccgtggcacacagacgtttgacgagctgtagagtgtcttgcttggtgtccaagagtcttattttcacactgatgggtttgctgtgagggttacccacgttcttaaccagttctttcaagatgagacacagtgtgtctggggtgcgcaagagggcagagcccatgccggagtgtatagagaagtgtttggggcagcctgcattgatatctatcccgctgacgtcgttgatcactttcaaagcagcctgggtggcca

SEQ ID NO: 200 - DNA, 2709 bp, Artificial Sequence
  SEQ ID NO. 200 pTEF1:CsOAC
  misc_feature (1)..(2709): n is a or g or c or t
ttgttgggattccattgtgattaaggctataatattaggtatgtagatatactagaagttctcctcgaggatttaggaatccataaaagggaatctgcaattctacacaattctataaatattattatcatcattttatatgttnnnnnnnnnnnnnnnnnnnnnnnnnnnnnnnnnnnnnnnnnnnnnnnnnnnnnnnnnnnnnnnnnnnnnnnnnnnnnnnnnnnnnnnnnnnnnnnnnnnnnnnnnnnnnnnnnnnnnnnnnnnnnnnnnnttagtagatgatagttgatttttattccaacattattgtactcagcaattgttgcgaaacagacaagattaagtatattattcaaggccttgcttacctagatgaaccattgagaaatatacatattgagcaatacctctaggtccgaagttccgtgcctacaccctttagtcagatttagattatatgagataagtggtattttgtggaccaagtttgtgattaatctgatatcaagttactttcttaacgacattaggacgccagggtagccagtattattcaagtccatagaacagcctgtataccttcacttcattaggtatattcttggttatgcgttatttaaatcctcatctgccgctgcttaaaaaaagcagctaaagtgttgcgtaggcaccttgccaacagggagttcttcagagacatggaggctcaaaacgaaattattgacagcctagacatcaatagtcatacaacagaaagcgaccacccaactttggctgataatagcgtataaacaatgcatactttgtacgttcaaaatacaatgcagtagatatatttatgcatattacatataatacatatcacataggaagcaacaggcgcgttggacttttaattttcgaggaccgcgaatccttacatcacacccaatcccccacaagtgatcccccacacaccatagcttcaaaatgtttctactccttttttactcttccagattttctcggactccgcgcatcgccgtaccacttcaaaacacccaagcacagcatactaaatttcccctctttcttcctctagggtgtcgttaattacccgtactaaaggtttggaaaagaaaaaagacaccgcctcgtttctttttcttcgtcgaaaaaggcaataaaaatttttatcacgtttctttttcttgaaaatttttttttttgatttttttctctttcgatgacctcccattgatatttaagttaataaacggtcatcaatttctcaagtttcagtttcatttttcttgttctattacaactttttttacttcttgctcattagaaagaaagcatagcaatctaatctaagttttaattacaaaatggccgtcaagcacttgatcgtcttaaagtttaaggacgagatcactgaagcccaaaaggaagaattcttcaaaacttacgttaacttggttaacatcattcctgctatgaaggacgtctactggggtaaggatgtcactcaaaaaaacaaggaagaaggttatacccacatcgttgaagtcaccttcgaatctgttgaaactattcaagactacatcattcacccagctcacgtcggtttcggtgatgtttacagatctttctgggaaaaattgttgatcttcgactacaccccaagaaagggctaaagtgcttttaactaagaattattagtcttttctgcttattttttcatcatagtttagaacactttatattaacgaatagtttatgaatctatttaggtttaaaaattgatacagttttataagttactttttcaaagactcgtgctgtctattgcataatgcactggaaggggaaaaaaaaggtgcacacgcgtggctttttcttgaatttgcagtttgaaaaataactacatggatgataagaaaacatggagtacagtcactttgagaaccttcaatcagctggtaacgtcttcgttaattggatactcaaaaaagatggatagcatgaatcacaagatggaaggaaatgcgggccacgaccacagtgatatgcatatgggagatggagatgataccttccgttaattcgggtttcaatcacttcgtttgtctatcgtatcgcagcctagtgaatatttaattctttcaataaaaaaggcttaaaatcaccatgaaaatcacaagaggaatctttcaacaagaacaatagtatacaatccatgaatgaaggagttcatatttgactagaactatacaaaggttttgtactgtttttactgtgagggtagcatctcatttatccagaatctcagaagggagaaacccaatcgctaaatcgatattatcacccagaagtttcaaataggcgattgtagaatatacacagggacaaccactcagtttatggcttcagtgcgcgcccagttctggaggaaagcattatcgaagtaataaaactttaaaaaagctctccgcaactaatgaggattgcagtatccagatacccttgttttctgccaaatgaacacttttactatgtcatataaacaaaaagtgccatttcttggtactgcttcagtcttaggaatggtcaatacgttattattacttaaatatacgattaataacatgctctgttgcgtatttagtaagtgtgtaaggaaactgtaatattacctaaccggtatcccacgtgtttcacgaa

SEQ ID NO: 201 - DNA, 4288 bp, Artificial Sequence
  SEQ ID NO. 201 pGAL1:CsAAE1
ctgatcgctaagggagccaattcggtcaatgattcgatggttactgtggtgttgtcagcattagacaaaagcgtcaatagcggcgtcagcgcgggagtatcagcaatatttttcatggcgccaaaaatatcatccaaggagctgttcggagccgtcaaagcggaccctaatattgtcaaaatagggcctatctgcgggatcaccttgcttacattgatgtgtttgatatcggcttcaccgatgtatatattcgttaagggtttgtagttggcggtggagccagcagtggctacaataaccaatatcagtgtggtgaacatgaataaaaggcacacagacaatatcgtccaaataattcccttcgacaggggggtacggtgcttttcgatcctcatgtttttgttgttttctttgctttcctaactcttcgtatgaggattttcgatggagcaggatgaggagaaatagtaccacatgtatatatccattacaaaaaggtttatatacaattacaatagacccttgttggggtttctgaaaaaagaagtagtcgatgccatcggcaataatacggaattacgagaaacacaatcccgatccttttttgggtaattacttcaccgattctaccgatttatcatgccaaaaaaaattcaccgtgggttctagaagtgccctttgaggattgtagccactctaacccacacggcctccttactagctgactaaggtgacaaaaccgcaaggactggaaagtcgccactcatctgaaaattctcaagtttttcactactgagtttatgctttcgaatttttttgttcggtaatagcacggcggttcgattccggattagaagccgccgagcgggtgacagccctccgaaggaagactctcctccgtgcgtcctcgtcttcaccggtcgcgttcctgaaacgcagatgtgcctcgcgccgcactgctccgaacaataaagattctacaatactagcttttatggttatgaagaggaaaaattggcagtaacctggccccacaaaccttcaaatgaacgaatcaaattaacaaccataggatgataatgcgattagttttttagccttatttctggggtaattaatcagcgaagcgatgatttttgatctattaacagatatataaatgcaaaaactgcataaccactttaactaatactttcaacattttcggtttgtattacttcttattcaaatgtaataaaagtatcaacaaaaaattgttaatatacctctatactttaacgtcaaggagatgggtaaaaactataagtctttagactccgttgtcgcctccgactttattgctttgggtatcacctccgaagttgctgaaactttacacggtagattagctgagattgtttgtaactacggtgccgccactccacaaacttggattaatatcgctaaccatattttgtctccagacttaccattctccttgcatcaaatgttgttttacggttgttataaagattttggtccagctcctccagcttggatcccagatcctgaaaaagttaagtctactaacttaggtgctttgttagaaaaaagaggtaaagaattcttgggtgttaagtataaagatccaatctcttccttctctcattttcaagaattctccgttagaaacccagaagtttattggagaaccgttttgatggacgaaatgaagatctccttctctaaggatcctgaatgtattttgagacgtgacgatatcaacaatccaggtggttctgaatggttaccaggtggttatttgaactctgctaaaaattgtttgaacgtcaattccaacaaaaaattgaacgacaccatgattgtttggagagacgaaggtaacgatgacttaccattaaacaagttgaccttggaccaattgagaaagcgtgtctggttggtcggttacgccttggaggaaatgggtttggaaaaaggttgtgccatcgctatcgatatgccaatgcacgtcgacgccgtcgttatctatttggccatcgttttagctggttacgtcgtcgtctccatcgctgactctttctccgctccagaaatttccactagattgagattatccaaggccaaggctattttcactcaagatcacattattagaggtaagaagcgtattccattgtactccagagtcgtcgaagccaagtctcctatggccattgttatcccatgttctggttctaacattggtgctgaattgagagatggtgacatttcctgggactatttcttggaaagagctaaggaatttaagaactgcgaatttaccgccagagaacaacctgttgatgcctacactaacattttgttctcttctggtacaactggtgagccaaaggctatcccttggactcaagctaccccattaaaggccgccgctgatggttggtcccacttggacattcgtaagggtgacgtcatcgtctggccaactaacttgggttggatgatgggtccatggttagtttacgcctctttgttaaacggtgcttccattgccttgtacaacggttctccattggtttctggtttcgctaagtttgtccaagacgccaaggttaccatgttaggtgttgttccatctatcgtcagatcttggaagtctactaactgtgtctctggttacgattggtctactatcagatgcttctcttcctctggtgaagcctctaacgttgatgaatatttgtggttgatgggtcgtgccaactacaagccagttatcgaaatgtgtggtggtacagagatcggtggtgctttttccgctggttcctttttgcaagctcaatctttgtcttctttctcttctcaatgtatgggttgtactttgtatattttggataagaacggttacccaatgcctaagaacaaaccaggtatcggtgaattagctttgggtccagttatgttcggtgcttccaagaccttgttgaacggtaatcaccatgatgtctatttcaaaggtatgccaactttaaacggtgaagtcttgagacgtcacggtgacatctttgaattgacttctaacggttactaccatgctcacggtagagctgatgatactatgaacattggtggtattaagatttcttctatcgaaatcgaaagagtttgtaatgaagttgacgacagagtctttgaaaccactgctattggtgtcccaccattgggtggtggtccagaacaattagtcattttcttcgttttgaaggattctaacgacactaccatcgacttaaaccaattgagattgtctttcaacttgggtttgcaaaagaagttgaacccattatttaaagtcactagagttgttccattgtcttctttgccaagaaccgccaccaacaagattatgagaagagttttgagacaacaattttctcatttcgaaggctgacgagcatgcatctagagggccgcatcatgtaattagttatgtcacgcttacattcacgccctccccccacatccgctctaaccgaaaaggaaggagttagacaacctgaagtctaggtccctatttatttttttatagttatgttagtattaagaacgttatttatatttcaaatttttcttttttttctgtacagacgcgtgtacgcatgtaacattatactgaaaaccttgcttgagaaggttttgggacgctcgaaggctttaatttgccacacgactagcgctttcagatattaaaaagtttagatgtaggttttagcggtaacagttatataaatcgtgtttcttctcttgatgaaacaaaaaaatgctagaaaaactttgtcgtttcttacttttggtgcgctttgcagttttcgtggctagacttagaatcatttctcctcagatttcttgattaaagtttggtgcgaagccctactctaacattggtgttcttcttttcattcacgcaagttaagtccaggaaggtgagcaaatgctcatccttctgttcatgcgtgacggctgaattatccttatctggcgtacccgtgcagccgtttccgtgcctcggttcctccgagatatccttagggaccgccagggaccatgattgcgtcaactgttgtcaccgctccagaggatcctctgtaaccttttcaaccataaaaatagaaagggcacagggttggggtatttgaattttttttttgggttttttcgtattacttattacttaccttcttttctatataattttgtttttccctggtagagcggaatcttccca

SEQ ID NO: 202 - DNA, 2516 bp, Artificial Sequence
  SEQ ID NO. 202 pGAL1:PKS73
cccaaagctaagagtcccattttattcttctatatgtatattttcgatactctaaaccaccctacaatgtagccctatactaaatctgctcaattttcagcttctacaagtgactcgagaccacgtggaaagatccaactactccagcacaacgattcaatataatcgattgctccactcataagaggcaagaacaagcttcaacttttggtaagccgccgtttataaacagggaagatgtcctttgtcaagggaggcacagagcatggccaatttggcaaattgcggattagaagccgccgagcgggtgacagccctccgaaggaagactctcctccgtgcgtcctcgtcttcaccggtcgcgttcctgaaacgcagatgtgcctcgcgccgcactgctccgaacaataaagattctacaatactagcttttatggttatgaagaggaaaaattggcagtaacctggccccacaaaccttcaaatgaacgaatcaaattaacaaccataggatgataatgcgattagttttttagccttatttctggggtaattaatcagcgaagcgatgatttttgatctattaacagatatataaatgcaaaaactgcataaccactttaactaatactttcaacattttcggtttgtattacttcttattcaaatgtaataaaagtatcaacaaaaaattgttaatatacctctatactttaacgtcaaggagatgtctaacaacaacccgtacattttgggcattggaacagccgttcctaatgagcccctaaagcagagtgagctttcagccgtgatgtccaaagatttctcatcagatccactagtcgttgataaggtcagtaagatattcgaacagagtcaaattaacactagatatctatatagaaaccctttgagggaggagacggccctgagacatagaaagaatgaaaatattaatgacgtgaatagacaatttcaaaaatgcgccccggatctgtcccagagggcgtgcgaaaaagcgattaaggagtggggtggctcaatacaagatatcacgcatatagtctctgtctcttctacaggagtggtcgtgccggatataaattttgtcctaatccaaagacttgggttgaataaagatatcgagaggttgagcgtcaactttatgggatgtcttgctgggctatcaagtatgagagcggctgttcctctggcgtctaagcacccgaagaacagagtgcttgtagtgtgtactgaaatatgctccacccacttcagcaccaaagagggcgtcgatcaaattgttgcctctacgatattcgccgacggttctgcagcatacatattagggtgtaatccgaccatatacgaacacccgttgtttgaggttattggtagcatgaccaggagcgtacctgacactgcgcacactatgacatgggatattagtacggatgggtgggatctgggcttagaccagtcaataccgcaccatatcggcggtgggattgaatcattcgtaaacgaccttctagcgaaaaataagtctcaaactcaggatcttacgccgaaggagtgtgagtttcttattcacactggcggcaaagctattttaatgagcattgaacaatctttgggaattacatcaaaacagaatcaacatagctgggatatttacagaaattatggtaacatgtcatctgcctctgtgatcttcgtactggaacatgcacgtcactcaaagtcattgcctcaatatagcattagtctggcttttggacccgggctggctttcgaagggtgtgtattaaagaacatggtgtgacgagcatgcatctagagggccgcatcatgtaattagttatgtcacgcttacattcacgccctccccccacatccgctctaaccgaaaaggaaggagttagacaacctgaagtctaggtccctatttatttttttatagttatgttagtattaagaacgttatttatatttcaaatttttcttttttttctgtacagacgcgtgtacgcatgtaacattatactgaaaaccttgcttgagaaggttttgggacgctcgaaggctttaatttgcgaattacaatagtatgtctgatgtctgcaagaagtaacaggcgtgtgcacaagaatacgtgtgtgtgcgtaagcgtatgcactggtggcataacttatctaagaagtatatatcactgacatagaaatgtagatatacaggtatttttctcgataatcgataaaaatctcgtcgcgctgaaccaaacttggtggttacggagagtttttctctcatcattactgtctttcgcattgatttcccctttgaccgataaaatcccttggattcataagattaaacaaagaggtgatcaaagagaaccctgtgaaagtttatgtttataaccgggcataaagtgaactagacactttcaagaagccaaccaaagcatgagtaacgaagcttaccagcatgatcataccgtaaatcctcaccag

SEQ ID NO: 203 - DNA, 3598 bp, Artificial Sequence
  SEQ ID NO. 203 pTEF1:OXC52
gcagagaaggagcaaataagccagttttaaggaaccgagataagctgttttcgcccattgttctagttctacaaaatatctacagggaatcgatgaggttgtaagaaatcctgaatactctatgatagtgcataacactaaaaagttgaaagaatcccgtatcatggacgatttccttgaacatttgagcaaagacgataacaaagcatggtatggcgcggaagaaaccgagagagctgcaaaattagatgcaatagaaacactacttattacagatagtgtactaaaaaggaacgacgtgaaaaaacgtgaaaaatacctagacctaatagagaatagtggaaacaacaatggcaaaatattcgtactcagtacttcaaaaatcacagtgagcaacttgacaaaccaacaccttgccaacagggagttcttcagagacatggaggctcaaaacgaaattattgacagcctagacatcaatagtcatacaacagaaagcgaccacccaactttggctgataatagcgtataaacaatgcatactttgtacgttcaaaatacaatgcagtagatatatttatgcatattacatataatacatatcacataggaagcaacaggcgcgttggacttttaattttcgaggaccgcgaatccttacatcacacccaatcccccacaagtgatcccccacacaccatagcttcaaaatgtttctactccttttttactcttccagattttctcggactccgcgcatcgccgtaccacttcaaaacacccaagcacagcatactaaatttcccctctttcttcctctagggtgtcgttaattacccgtactaaaggtttggaaaagaaaaaagacaccgcctcgtttctttttcttcgtcgaaaaaggcaataaaaatttttatcacgtttctttttcttgaaaatttttttttttgatttttttctctttcgatgacctcccattgatatttaagttaataaacggtcatcaatttctcaagtttcagtttcatttttcttgttctattacaactttttttacttcttgctcattagaaagaaagcatagcaatctaatctaagttttaattacaaaatgaggcaggtttggttctcttggattgtgggattgttcctatgttttttcaacgtgtcttctgctgctccagtcaacactacaacagaagatgaaacggcacaaattccggctgaagctgtcatcggttactcagatttagaaggggatttcgatgttgctgttttgccattttccaacagcacaaataacgggttattgtttataaatactactattgccagcattgctgctaaagaagaaggggtatctctcgagaaaagagaggctgaagctatgccaagagaaaacttcttgaagtgcttctcccaatatatcccaaacaacgctactaacttaaagttagtttacactcaaaacaatccattatacatgtctgtcttaaactctactattcataacttaagatttacttccgatactacccctaagccattggttatcgtcaccccatctcacgtctcccatatccaaggtactatcttatgttctaagaaggttggtttgcaaatccgtactagatctggtggtcacgactctgaaggtatgtcctatatctctcaagtcccatttgtcattgttgacttaagaaatatgagatccattaaaattgatgttcattctcaaactgcttgggtcgaagctggtgccaccttgggtgaagtttactactgggtcaacgaaaaaaacgaaaacttatctttagctgccggttactgtccaaccgtctgtgctggtggtcatttcggtggtggtggttacggtccattgatgcgtaactacggtttagctgctgacaacattattgacgctcatttagttaatgttcacggtaaggttttggacagaaaatctatgggtgaagatttattttgggccttgagaggtggtggtgctgaatccttcggtatcatcgttgcctggaagattcgtttagttgctgtccctaagtccaccatgttctccgtcaagaaaatcatggaaattcatgagttggtcaaattggttaacaagtggcaaaacatcgcttacaagtatgacaaggatttgttgttaatgactcacttcatcacccgtaatatcaccgacaaccaaggtaagaacaaaactgctattcacacctacttctcctccgtttttttgggtggtgtcgactccttagtcgatttgatgaacaaatcctttccagaattgggtattaagaaaactgattgtagacaattgtcttggattgacaccattatcttctattctggtgtcgttaactacgacaccgacaactttaacaaggaaattttgttggatcgttctgctggtcaaaatggtgccttcaaaatcaaattggactacgtcaaaaagccaatcccagaatctgttttcgttcaaattttggaaaagttgtacgaagaagacattggtgccggtatgtatgctttgtatccatatggtggtatcatggacgaaatttccgaatctgccatcccattcccacacagagctggtattttatatgaattgtggtacatctgttcttgggaaaagcaagaagacaacgaaaagcatttaaactggattagaaacatttacaacttcatgaccccatacgtttctaagaacccaagattagcctatttgaactaccgtgacttagatattggtattaatgacccaaagaacccaaacaactatactcaagccagaatttggggtgaaaagtacttcggtaagaacttcgatagattagttaaggttaaaactttggtcgatccaaacaacttcttcagaaacgaacaatccatcccaccattgccaagacatcgtcacggccatcatcaccatcaccattagctcgagcatgcatctagagggccgcatcatgtaattagttatgtcacgcttacattcacgccctccccccacatccgctctaaccgaaaaggaaggagttagacaacctgaagtctaggtccctatttatttttttatagttatgttagtattaagaacgttatttatatttcaaatttttcttttttttctgtacagacgcgtgtacgcatgtaacattatactgaaaaccttgcttgagaaggttttgggacgctcgaaggctttaatttgccaatagcttgcagcgtagctaaactctaaaatttatctaaatcactcatataaaccgaacccttccccttccgcttatagtacagtacctatacatttcataaacatggcatggcgatcagcgccaaacaatatggaaaatccacagaaagctattcattgaaaaaatagtacaaataagtcacatgatgatatttgattttattatatttttaaaaaaagtaaaaaataaaaagtagtttatttttaaaaaataaaatttaaaatattagtgtatttgatttccgaaagttaaaaaagaaatagtaagaaatatatatttcattgaatggatatatgaaacgtttactggtggaagttttgctc

SEQ ID NO: 204 - DNA, 3601 bp, Artificial Sequence
  SEQ ID NO: 204 pTEF1OXC154-S88AL451G
gcagagaaggagcaaataagccagttttaaggaaccgagataagctgttttcgcccattgttctagttctacaaaatatctacagggaatcgatgaggttgtaagaaatcctgaatactctatgatagtgcataacactaaaaagttgaaagaatcccgtatcatggacgatttccttgaacatttgagcaaagacgataacaaagcatggtatggcgcggaagaaaccgagagagctgcaaaattagatgcaatagaaacactacttattacagatagtgtactaaaaaggaacgacgtgaaaaaacgtgaaaaatacctagacctaatagagaatagtggaaacaacaatggcaaaatattcgtactcagtacttcaaaaatcacagtgagcaacttgacaaaccaacaccttgccaacagggagttcttcagagacatggaggctcaaaacgaaattattgacagcctagacatcaatagtcatacaacagaaagcgaccacccaactttggctgataatagcgtataaacaatgcatactttgtacgttcaaaatacaatgcagtagatatatttatgcatattacatataatacatatcacataggaagcaacaggcgcgttggacttttaattttcgaggaccgcgaatccttacatcacacccaatcccccacaagtgatcccccacacaccatagcttcaaaatgtttctactccttttttactcttccagattttctcggactccgcgcatcgccgtaccacttcaaaacacccaagcacagcatactaaatttcccctctttcttcctctagggtgtcgttaattacccgtactaaaggtttggaaaagaaaaaagacaccgcctcgtttctttttcttcgtcgaaaaaggcaataaaaatttttatcacgtttctttttcttgaaaatttttttttttgatttttttctctttcgatgacctcccattgatatttaagttaataaacggtcatcaatttctcaagtttcagtttcatttttcttgttctattacaactttttttacttcttgctcattagaaagaaagcatagcaatctaatctaagttttaattacaaaatgaggcaggtttggttctcttggattgtgggattgttcctatgttttttcaacgtgtcttctgctgctccagtcaacactacaacagaagatgaaacggcacaaattccggctgaagctgtcatcggttactcagatttagaaggggatttcgatgttgctgttttgccattttccaacagcacaaataacgggttattgtttataaatactactattgccagcattgctgctaaagaagaaggggtatctctcgagaaaagagaggctgaagctatgccaagagaaaacttcttgaagtgcttctcccaatatatcccaaacaacgctactaacttaaagttagtttacactcaaaacaatccattatacatgtctgtcttaaactctactattcataacttaagatttacttccgatactacccctaagccattggttatcgtcaccccatctcacgtctcccatatccaaggtactatcttatgttctaagaaggttggtttgcaaatccgtactagatctggtggtcacgacgctgaaggtatgtcctatatctctcaagtcccatttgtcattgttgacttaagaaatatgagatccattaaaattgatgttcattctcaaactgcttgggtcgaagctggtgccaccttgggtgaagtttactactgggtcaacgaaaaaaacgaaaacttatctttagctgccggttactgtccaaccgtctgtgctggtggtcatttcggtggtggtggttacggtccattgatgcgtaactacggtttagctgctgacaacattattgacgctcatttagttaatgttcacggtaaggttttggacagaaaatctatgggtgaagatttattttgggccttgagaggtggtggtgctgaatccttcggtatcatcgttgcctggaagattcgtttagttgctgtcccttctaagtccaccatgttctccgtcaagaaaatcatggaaattcatgagttggtcaaattggttaacaagtggcaaaacatcgcttacaagtatgacaaggatttgttgttaatgactcacttcatcacccgtaatatcaccgacaaccaaggtaagaacaaaactgctattcacacctacttctcctccgtttttttgggtggtgtcgactccttagtcgatttgatgaacaaatcctttccagaattgggtattaagaaaactgattgtagacaattgtcttggattgacaccattatcttctattctggtgtcgttaactacgacaccgacaactttaacaaggaaattttgttggatcgttctgctggtcaaaatggtgccttcaaaatcaaattggactacgtcaaaaagccaatcccagaatctgttttcgttcaaattttggaaaagttgtacgaagaagacattggtgccggtatgtatgctttgtatccatatggtggtatcatggacgaaatttccgaatctgccatcccattcccacacagagctggtattttatatgaattgtggtacatctgttcttgggaaaagcaagaagacaacgaaaagcatttaaactggattagaaacatttacaacttcatgaccccatacgtttctaagaacccaagaggtgcctatttgaactaccgtgacttagatattggtattaatgacccaaagaacccaaacaactatactcaagccagaatttggggtgaaaagtacttcggtaagaacttcgatagattagttaaggttaaaactttggtcgatccaaacaacttcttcagaaacgaacaatccatcccaccattgccaagacatcgtcacggccatcatcaccatcaccattagctcgagcatgcatctagagggccgcatcatgtaattagttatgtcacgcttacattcacgccctccccccacatccgctctaaccgaaaaggaaggagttagacaacctgaagtctaggtccctatttatttttttatagttatgttagtattaagaacgttatttatatttcaaatttttcttttttttctgtacagacgcgtgtacgcatgtaacattatactgaaaaccttgcttgagaaggttttgggacgctcgaaggctttaatttgccaatagcttgcagcgtagctaaactctaaaatttatctaaatcactcatataaaccgaacccttccccttccgcttatagtacagtacctatacatttcataaacatggcatggcgatcagcgccaaacaatatggaaaatccacagaaagctattcattgaaaaaatagtacaaataagtcacatgatgatatttgattttattatatttttaaaaaaagtaaaaaataaaaagtagtttatttttaaaaaataaaatttaaaatattagtgtatttgatttccgaaagttaaaaaagaaatagtaagaaatatatatttcattgaatggatatatgaaacgtttactggtggaagttttgctc

SEQ ID NO: 205 - DNA, 3390 bp, Artificial Sequence
  SEQ ID NO. 205 pGAL1:OXC157
gcagagaaggagcaaataagccagttttaaggaaccgagataagctgttttcgcccattgttctagttctacaaaatatctacagggaatcgatgaggttgtaagaaatcctgaatactctatgatagtgcataacactaaaaagttgaaagaatcccgtatcatggacgatttccttgaacatttgagcaaagacgataacaaagcatggtatggcgcggaagaaaccgagagagctgcaaaattagatgcaatagaaacactacttattacagatagtgtactaaaaaggaacgacgtgaaaaaacgtgaaaaatacctagacctaatagagaatagtggaaacaacaatggcaaaatattcgtactcagtacttcaaaaatcacagtgagcaacttgacaaaccaacacggattagaagccgccgagcgggtgacagccctccgaaggaagactctcctccgtgcgtcctcgtcttcaccggtcgcgttcctgaaacgcagatgtgcctcgcgccgcactgctccgaacaataaagattctacaatactagcttttatggttatgaagaggaaaaattggcagtaacctggccccacaaaccttcaaatgaacgaatcaaattaacaaccataggatgataatgcgattagttttttagccttatttctggggtaattaatcagcgaagcgatgatttttgatctattaacagatatataaatgcaaaaactgcataaccactttaactaatactttcaacattttcggtttgtattacttcttattcaaatgtaataaaagtatcaacaaaaaattgttaatatacctctatactttaacgtcaaggagaaaaaaccccggatcggactactagcagctgtaatacgactcactatagggaatattaagcttaaacaatgaggcaggtttggttctcttggattgtgggattgttcctatgttttttcaacgtgtcttctgctgctccagtcaacactacaacagaagatgaaacggcacaaattccggctgaagaggtcatcggttactcagatttagaaggggatttcgatgttgctgttttgccattttccaacagcacaaataacgggttattgtttataaatactactattgccagcattgctgctaaagaagaaggggtatctctcgagaaaagagaggctgaagctatgccaggggaaaacttcttgaagtgcttctcccaatatatcccaaacaacgagactaacttaaagttagtttacactcaaaacaatccattatacatgtctgtcttaaactctactattcataacttaagatttacttccgatactacccctaagccattggttatcgtcaccccaacgcacgtctcccatatccaaggtactatcttatgttctaagaaggttggtttgcaaatccgtactagatctggtggtcacgactctgaaggtatgtcctatatctctcaagtcccatttgtcattgttgacttaagaaatatgagatccattaaaattgatgttcattctcaaactgcttgggtcgaagctggtgccaccttgggtgaagtttactactgggtcaacgaaaaaaacgaaaacttatctttagctgccggttactgtccaaccgtctgtgctggtggtcatttcggtggtggtggttacggtccattgatgcgtaactacggtttagctgctgacaacattattgacgctcatttagttaatgttcacggtaaggttttggacagaaaatctatgggtgaagatttattttgggccttgagaggtggtggtgctgaatccttcggtatcatcgttgcctggaagattcgtttagttgctgtcccttctaagtccaccatgttctccgtcaagaaaatcatggaaattcatgagttggtcaaattggttaacaagtggcaaaacatcgcttacaagtatgacaaggatttgttgttaatgactcacttcatcacccgtaatatcaccgacaaccaaggtaagaacaaaactgctattcacacctacttctcctccgtttttttgggtggtgtcgactccttagtcgatttgatgaacaaatcctttccagaattgggtattaagaaaactgattgtagacaattgtcttggattgacaccattatcttctattctggtgtcgttaactacgacaccgacaactttaacaaggaaattttgttggatcgttctgctggtcaaaatatcgccttcaaaatcaaattggactacgtcaaaaagccaatcccagaatctgttttcgttcaaattttggaaaagttgtacgaagaagacattggtgtgggtatgtatgctttgtatccatatggtggtatcatggacgaaatttccgaatctgccatcccattcccacacagagctggtattttatatgaattgtggtacatctgttcttgggaaaagcaagaagacaacgaaaagcatttaaactggattagaaacatttacaacttcatgaccccatacgtttctaagaacccaagaggcgcctatttgaactaccgtgacttagatattggtattaatgacccaaagaacccaaacaactatactcaagccagaatttggggtgaaaagtacttcggtaagaacttcgatagattagttaaggttaaaactttggtcgatccaaacaacttcttcagaaacgaacaatccatcccaccattgccaagacatcgtcacggcctcgagcatgcatctagagggccgcatcatgtaattagttatgtcacgcttacattcacgccctccccccacatccgctctaaccgaaaaggaaggagttagacaacctgaagtctaggtccctatttatttttttatagttatgttagtattaagaacgttatttatatttcaaatttttcttttttttctgtacagacgcgtgtacgcatgtaacattatactgaaaaccttgcttgagaaggttttgggacgctcgaaggctttaatttgccaatagcttgcagcgtagctaaactctaaaatttatctaaatcactcatataaaccgaacccttccccttccgcttatagtacagtacctatacatttcataaacatggcatggcgatcagcgccaaacaatatggaaaatccacagaaagctattcattgaaaaaatagtacaaataagtcacatgatgatatttgattttattatatttttaaaaaaagtaaaaaataaaaagtagtttatttttaaaaaataaaatttaaaatattagtgtatttgatttccgaaagttaaaaaagaaatagtaagaaatatatatttcattgaatggatatatgaaacgtttactggtggaagttttgctc

SEQ ID NO: 206 - protein, 6 aa, Artificial Sequence
  SEQ ID NO:206 (His Tag)
HHHHHH

SEQ ID NO: 207 - protein, 524 aa, Artificial Sequence
  OCX154 Mutant/Variant (generalized)
  MISC_FEATURE (1)..(524): Xaa is any amino acid
MXXENFLKCFSQYIPNNXTNXKLVYXQNNPLYMSVLNSTIHNLRFTXDXTPKPLVIVTPXHVSHIQGTILCSKKVGLQIRTRSGGHDXEGMSYISQXPFVIVDLRNMRSIKIDVHSQTAWVEAGATLGEVYYWVNEKNENLSLAAGYCPTVCAGGHFGGGGYGPLMRNYGLAADNIIDAHLVNVHGKVLDRKSMGEDLFWALRGGGAESFGIIVAWKIRLVAVPXKSTMFSVKKIMEIHELVKLVNKWQNIAYKYDKDLLLMTHFITRNITDNQGKNKTAIHTYFSSVFLGGVDSLVDLMNKSFPELGIKKTDCRQLSWIDTIIFYSGVVXYDTDNFNKEILLDRSXGXNXAFKIKLDYVKKPIPESVFVQXLEKLYEEDIGXGMYALYPYGGIMDEISESAIPFPHRAGILYELWYICSWEKQEDNEKHLNWIRNIYNFMTPYVSKNPRXAYLNYRDLDIGINDPKNPNNYTQARIWGEKYFGKNFDRLVKVKTLVDPNNFFRNEQSIPPLPRHRHGHHHHHH

SEQ ID NO: 208 - DNA, 6114 bp, Artificial Sequence; identical to SEQ ID NO: 3
  Gal1p:RFP:Cyc1t, VB40_RFP_mScarlett, Ex. 6

SEQ ID NO: 209 - DNA, 7266 bp, Artificial Sequence
  SEQ ID NO: 209 - VB40_ostI-proaf(I)_OXC53 Example 6
atgaggcaggtttggttctcttggattgtgggattgttcctatgttttttcaacgtgtcttctgctgctccagtcaacactacaacagaagatgaaacggcacaaattccggctgaagctgtcatcggttactcagatttagaaggggatttcgatgttgctgttttgccattttccaacagcacaaataacgggttattgtttataaatactactattgccagcattgctgctaaagaagaaggggtatctctcgagaaaagagaggctgaagctatgccaagagaaaacttcttgaagtgtttctctaagcatatcccaaacaacgttgctaacccaaagttggtctatactcaacacgatcaattgtatatgtctattttgaactctactattcaaaatttgagattcatttctgataccaccccaaaaccattggtcattgtcactccttccaacaactcccatatccaagctactattttgtgttctaagaaggtcggtttgcaaatcagaaccagatctggtggtcacgatgccgagggtatgtcctacatttctcaagttccttttgtcgttgttgatttgagaaacatgcactccatcaaaattgatgttcactcccaaaccgcctgggtcgaagctggtgccactttgggtgaagtctactactggattaatgaaaagaatgaaaatttgtccttcccaggtggttactgtccaaccgttggtgttggtggtcacttctccggtggtggttacggtgctttgatgagaaactacggtttagctgctgataacattatcgacgcccacttggttaatgttgatggtaaagtcttggacagaaaatctatgggtgaagatttgttttgggccattagaggtggtggtggtgagaacttcggtatcattgctgcctggaagatcaaattggttgctgttccatctaagtccactattttttccgttaagaagaacatggaaatccatggtttagttaaattatttaacaagtggcaaaacattgcctacaagtacgataaagatttggttttgatgacccatttcattactaagaatattactgacaatcacggtaagaacaagactaccgttcacggttacttctcttctattttccacggtggtgtcgactccttagttgatttgatgaacaaatcctttccagagttgggtattaagaagactgattgtaaggaattctcttggattgacaccaccatcttctactctggtgtcgtcaactttaacactgccaactttaagaaggaaattttattggatagatccgctggtaagaagaccgctttttccatcaaattggattacgtcaagaagccaatccctgagactgccatggtcaagatcttggaaaagttgtatgaagaagacgttggtgctggtatgtacgttttatatccatacggtggtattatggaagagatttccgaatccgctattccattcccacatagagctggtatcatgtacgaattgtggtacactgcttcttgggaaaaacaagaagataatgaaaagcatattaactgggttagatccgtttacaacttcaccactccatatgtttctcaaaacccaagattggcttacttgaactatagagatttggatttgggtaagactaaccacgcctctccaaacaattacactcaagctagaatctggggtgaaaaatacttcggtaagaacttcaacagattagtcaaagtcaagaccaaagttgacccaaacaacttcttcagaaacgagcaatccattcctccattgcctccacaccatcacggccatcatcaccatcaccattagctcgagcatgcatctagagggccgcatcatgtaattagttatgtcacgcttacattcacgccctccccccacatccgctctaaccgaaaaggaaggagttagacaacctgaagtctaggtccctatttatttttttatagttatgttagtattaagaacgttatttatatttcaaatttttcttttttttctgtacagacgcgtgtacgcatgtaacattatactgaaaaccttgcttgagaaggttttgggacgctcgaaggctttaatttgcggccctgcattaatgaatcggccaacgcgcggggagaggcggtttgcgtattgggcgctcttccgcttcctcgctcactgactcgctgcgctcggtcgttcggctgcggcgagcggtatcagctcactcaaaggcggtaatacggttatccacagaatcaggggataacgcaggaaagaacatgtgagcaaaaggccagcaaaagcccaggaaccgtaaaaaggccgcgttgctggcgtttttccataggctccgcccccctgacgagcatcacaaaaatcgacgctcaagtcagaggtggcgaaacccgacaggactataaagataccaggcgtttccccctggaagctccctcgtgcgctctcctgttccgaccctgccgcttaccggatacctgtccgcctttctcccttcgggaagcgtggcgctttctcatagctcacgctgtaggtatctcagttcggtgtaggtcgttcgctccaagctgggctgtgtgcacgaaccccccgttcagcccgaccgctgcgccttatccggtaactatcgtcttgagtccaacccggtaagacacgacttatcgccactggcagcagccactggtaacaggattagcagagcgaggtatgtaggcggtgctacagagttcttgaagtggtggcctaactacggctacactagaagaacagtatttggtatctgcgctctgctgaagccagttaccttcggaaaaagagttggtagctcttgatccggcaaacaaaccaccgctggtagcggtggtttttttgtttgcaagcagcagattacgcgcagaaaaaaaggatctcaagaagatcctttgatcttttctacggggtctgacgctcagtggaacgaaaactcacgttaagggattttggtcatgagattatcaaaaaggatcttcacctagatccttttaaattaaaaatgaagttttaaatcaatctaaagtatatatgagtaaacttggtctgacagttaccaatgcttaatcagtgaggcacctatctcagcgatctgtctatttcgttcatccatagttgcctgactccccgtcgtgtagataactacgatacgggagcgcttaccatctggccccagtgctgcaatgataccgcgagacccacgctcaccggctccagatttatcagcaataaaccagccagccggaagggccgagcgcagaagtggtcctgcaactttatccgcctccattcagtctattaattgttgccgggaagctagagtaagtagttcgccagttaatagtttgcgcaacgttgttggcattgctacaggcatcgtggtgtcactctcgtcgtttggtatggcttcattcagctccggttcccaacgatcaaggcgagttacatgatcccccatgttgtgcaaaaaagcggttagctccttcggtcctccgatcgttgtcagaagtaagttggccgcagtgttatcactcatggttatggcagcactgcataattctcttactgtcatgccatccgtaagatgcttttctgtgactggtgagtactcaaccaagtcattctgagaatagtgtatgcggcgaccgagttgctcttgcccggcgtcaatacgggataatagtgtatcacatagcagaactttaaaagtgctcatcattggaaaacgttcttcggggcgaaaactctcaaggatcttaccgctgttgagatccagttcgatgtaacccactcgtgcacccaactgatcttcagcatcttttactttcaccagcgtttctgggtgagcaaaaacaggaaggcaaaatgccgcaaaaaagggaataagggcgacacggaaatgttgaatactcatactcttcctttttcaatgggtaataactgatataattaaattgaagctctaatttgtgagtttagtatacatgcatttacttataatacagttttttagttttgctggccgcatcttctcaaatatgcttcccagcctgcttttctgtaacgttcaccctctaccttagcatcccttccctttgcaaatagtcctcttccaacaataataatgtcagatcctgtagagaccacatcatccacggttctatactgttgacccaatgcgtctcccttgtcatctaaacccacaccgggtgtcataatcaaccaatcgtaaccttcatctcttccacccatgtctctttgagcaataaagccgataacaaaatctttgtcgctcttcgcaatgtcaacagtacccttagtatattctccagtagatagggagcccttgcatgacaattctgctaacatcaaaaggcctctaggttcctttgttacttcttctgccgcctgcttcaaaccgctaacaatacctgggcccaccacaccgtgtgcattcgtaatgtctgcccattctgctattctgtatacacccgcagagtactgcaatttgactgtattaccaatgtcagcaaattttctgtcttcgaagagtaaaaaattgtacttggcggataatgcctttagcggcttaactgtgccctccatggaaaaatcagtcaagatatccacatgtgtttttagtaaacaaattttgggacctaatgcttcaactaactccagtaattccttggtggtacgaacatccaatgaagcacacaagtttgtttgcttttcgtgcatgatattaaatagcttggcagcaacaggactaggatgagtagcagcacgttccttatatgtagctttcgacatgatttatcttcgtttcctgcaggtttttgttctgtgcagttgggttaagaatactgggcaatttcatgtttcttcaacactacatatgcgtatatataccaatctaagtctgtgctccttccttcgttcttccttctgttcggagattaccgaatcaaaaaaatttcaaagaaaccgaaatcaaaaaaaagaataaaaaaaaaatgatgaattgaattgaaaagctagcttatcgatgataagctgtcaaagatgagaattaattccacggactatagactatactagatactccgtctactgtacgatacacttccgctcaggtccttgtcctttaacgaggccttaccactcttttgttactctattgatccagctcagcaaaggcagtgtgatctaagattctatcttcgcgatgtagtaaaactagctagaccgagaaagagactagaaatgcaaaaggcacttctacaatggctgccatcattattatccgatgtgacgctgcagcttctcaatgatattcgaatacgctttgaggagatacagcctaatatccgacaaactgttttacagatttacgatcgtacttgttacccatcattgaattttgaacatccgaacctgggagttttccctgaaacagatagtatatttgaacctgtataataatatatagtctagcgctttacggaagacaatgtatgtatttcggttcctggagaaactattgcatctattgcataggtaatcttgcacgtcgcatccccggttcattttctgcgtttccatcttgcacttcaatagcatatctttgttcgcttgcctgtaacttacacgcgcctcgtatcttttaatgatggaataatttgggaatttactctgtgtttatttatttttatgttttgtatttggattttagaaagtaaataaagaaggtagaagagttacggaatgaagaaaaaaaaataaacaaaggtttaaaaaatttcaacaaaaagcgtactttacatatatatttattagacaagaaaagcagattaaatagatatacattcgattaacgataagtaaaatgtaaaatcacaggattttcgtgtgtggtcttctacacagacaagatgaaacaattcggcattaatacctgagagcaggaagagcaagataaaaggtagtatttgttggcgatccccctagagtcttttacatcttcggaaaacaaaaactattttttctttaatttctttttttactttctatttttaatttatatatttatattaaaaaatttaaattataattatttttatagcacgtgatgaaaaggaccgggaagctccaccccggttgataatcagaaaagccccaaaaacaggaagattgtataagcaaatatttaaattgtaaacgttaatattttgttaaaattcgcgttaaatttttgttaaatcagctcattttttaacgaatagcccgaaatcggcaaaatcccttataaatcaaaagaatagaccgagatagggttgagtgttgttccagtttccaacaagagtccactattaaagaacgtggactccaacgtcaaagggcgaaaaagggtctatcagggcgatggcccactacgtgaaccatcaccctaatcaagttttttggggtcgaggtgccgtaaagcagtaaatcggaagggtaaacggatgcccccatttagagcttgacggggaaagccggcgaacgtggcgagaaaggaagggaagaaagcgaaaggagcgggggctagggcggtgggaagtgtaggggtcacgctgggcgtaaccaccacacccgccgcgcttaatggggcgctacagggcgcgtggggatgatccactagtacggattagaagccgccgagcgggtgacagccctccgaaggaagactctcctccgtgcgtcctcgtcttcaccggtcgcgttcctgaaacgcagatgtgcctcgcgccgcactgctccgaacaataaagattctacaatactagcttttatggttatgaagaggaaaaattggcagtaacctggccccacaaaccttcaaatgaacgaatcaaattaacaaccataggatgataatgcgattagttttttagccttatttctggggtaattaatcagcgaagcgatgatttttgatctattaacagatatataaatgcaaaaactgcataaccactttaactaatactttcaacattttcggtttgtattacttcttattcaaatgtaataaaagtatcaacaaaaaattgttaatatacctctatactttaacgtcaaggagaaaaaaccccggatcggactactagcagctgtaatacgactcactatagggaatattaagcttaaaca

SEQ ID NO: 210 - DNA, 7266 bp, Artificial Sequence; identical to SEQ ID NO: 158
  SEQ ID NO:210, VB40_Ost1-proaf-OXC158, Ex 6

SEQ ID NO: 211 - protein, 524 aa, Artificial Sequence; identical to SEQ ID NO: 161
  OXC154-R3G(=GGG)/A18E(=GAG)/S60T(=ACG)/G351I(=ATC)/A383V(=GTG)/L4 51G(=GGC)

1. A method of producing cannabidiolic acid (CBDa) or a phytocannabinoid produced therefrom in a heterologous host cell comprising CBDa-producing, CBCa-producing, or other phytocannabinoid-producing capacity, said method comprising:
transforming said host cell with a nucleotide encoding a variant CBDa synthase protein having a serine insertion between residues P224 and K225 and one or more other amino acid mutations relative to the wild type CBDa synthase protein OXC52 (SEQ ID NO:140), and
culturing said transformed host cell to produce CBDa, CBCa, and/or a phytocannabinoid therefrom,
wherein said variant CBDa synthase protein comprises at least 85%, 90%, 95%, or 99% sequence identity with OXC154 (SEQ ID NO:141).

2. The method of claim 1, wherein the one or more amino acid mutations is at a location:
selected from the group consisting of residues 451, 2, 3, 5, 18, 21, 26, 28, 31, 47, 49, 60, 88, 97, 225, 274, 295, 331, 347, 349, 351, 367, 372, 383, 399, 513, and 515 of OXC154 (SEQ ID NO:141),
selected from the group consisting of residues 451, 3, 18, 49, and 97 of OXC154, or
selected from the group consisting of residues 451, 3, and 18 of OXC154.

3. The method of claim 1, wherein said variant CBDa synthase protein has a non-conservative amino acid substitution in at least 2 amino acid locations
selected from the group consisting of: residues 451, 2, 3, 5, 18, 21, 26, 28, 31, 47, 49, 60, 88, 97, 225, 274, 295, 331, 347, 349, 351, 367, 372, 383, 399, 513, and 515 of OXC154 (SEQ ID NO:141),
selected from the group consisting of residues 451, 3, 18, 49, and 97 of OXC154, or
selected from the group consisting of residues 451, 3, and 18 of OXC154.

4. The method of claim 1, wherein said variant CBDa synthase protein comprises:
an amino acid mutation at 451, and
at least one other mutation comprising a non-conservative amino acid substitution at a location
selected from the group consisting of: residues 2, 3, 5, 18, 21, 26, 28, 31, 47, 49, 60, 88, 97, 225, 274, 295, 331, 347, 349, 351, 367, 372, 383, 399, 513, and 515 of OXC154 (SEQ ID NO:141),
selected from the group consisting of residues 3, 18, 49, and 97 of OXC154, or
selected from the group consisting of residues 3 and 18 of OXC154.

5. The method according to claim 1, wherein the nucleotide encoding the variant CBDa synthase protein has a sequence comprising:
(a) a nucleotide sequence according to:
SEQ ID NO:187,
SEQ ID NO:4-71,
SEQ ID NO:157-160,
SEQ ID NO:165-172,
SEQ ID NO:181-186, 188, 209, or 210;
(b) a nucleotide sequence having at least 85%, at least 90%, at least 95%, or at least 99%, identity with the sequence of (a); or
(c) a nucleotide sequence that hybridizes with the complementary strand of the nucleotide having the sequence of (a).

6. The method according to claim 1, wherein the variant CBDa synthase protein comprises:
(a) a sequence according to:
SEQ ID NO:195,
SEQ ID NO:72-139,
SEQ ID NO:161-164,
SEQ ID NO:173-180,
SEQ ID NO:189-194, 196, or 211;
(b) a sequence of at least 85%, at least 90%, at least 95%, or at least 99%, identity with the sequence of (a).

7. The method according to claim 1, wherein the amino acid mutations relative to OXC154 (SEQ ID NO:141), are selected from the group consisting of:
L451G;
P2W;
R3G, R3T, R3W, R3V, or R3A;
N5Q;
A18E;
L21G;
T26A;
N28E;
L31E;
S47F;
T49R;
S60T;
S88A;
V97E or V97D;
Q274G;
N331G;
A347G;
Q349G;
G351I, G351R, or G351M;
S367Q; S367N; S367R; or S367K;
1372L;
A383V;
V383A; V383M; V383G;
S399G;
L451G;
P513V; and/or
H515E.

8. The method of claim 1, wherein the host cell is transformed with a nucleotide encoding:
(a) a variant CBDa synthase protein with at least 85%, at least 90%, at least 95%, at least 99%, or 100% sequence identity of any one of the following sequences with the indicated substitutions from OXC154 (SEQ ID NO:141):
OXC154-S88A/L451G (SEQ ID NO:72),
OXC154-R3G/L21G/S60T/S88A (SEQ ID NO:73),
OXC154-R3G/A18E/T49R/S60T/S88A (SEQ ID NO:74),
OXC154-R3T/T49R/S88A (SEQ ID NO:75),
OXC154-R3W/A18E/T49R/S60T/S88A (SEQ ID NO:76),
OXC154-R3V/T49R/S60T/S88A (=GCT) (SEQ ID NO:77),
OXC154-R3V/T49R/S60T/S88A (=GCC) (SEQ ID NO:78),
OXC154-A18A (SEQ ID NO:79),
OXC154-R3T/A18E/T49R/S88A (=GCC) (SEQ ID NO:80),
OXC154-R3T/S88A (=GCC) (SEQ ID NO:81),
OXC154-R3G(=GGG)/L21G/T49R (=GCC) (SEQ ID NO:82),
OXC154-R3T/T49R/S88A(=GCT) (SEQ ID NO:83),
OXC154-R3G(=GGA)/A18E/T49R/S60T/S88A(=GCC) (SEQ ID NO:84),
OXC154-R3W/T49R/S88A(=GCC)/V97E (SEQ ID NO:85),
OXC154-R3G(=GGG)/A18E/S88A(=GCC) (SEQ ID NO:86),
OXC154-R3V/A18E/T49R/S60T/S88A(=GCC) (SEQ ID NO:87),
OXC154-S60T/S88A(=GCC) (SEQ ID NO:88),
OXC154-R3T/A18E/T49R/S60T/S88A(=GCT) (SEQ ID NO:89),
OXC154-R3W/L21G/T49R/S88A(=GCC)/V97E (SEQ ID NO:90),
OXC154-R3T/A18E/T49R/S60T (SEQ ID NO:91),
OXC154-P2W/T26A/S60T (SEQ ID NO:91),
OXC154-R3G(=GGG)/L21G/S60T/S88A(=GCC)/V97E (SEQ ID NO:93),
OXC154-R3G(=GGG)/A18E/T49R/S88A(=GCC) (SEQ ID NO:94),
OXC154-R3T/L21G/S60T/S88A(=GCC)/V97D (SEQ ID NO:95),
OXC154-P2W/L21G/T49R/S88A(=GCC)/V97E (SEQ ID NO:96),
OXC154-R3G(=GGG)/L21G/T49R/S88A(=GCT) (SEQ ID NO:97),
OXC154-S295S(=TCA) (SEQ ID NO:98),
OXC154-R3V/L21G/S60T/S88A(=GCC) (SEQ ID NO:99),
OXC154-R3T/A18E/S88A(=GCC) (SEQ ID NO:100),
OXC154-S60T/S88A(=GCT) (SEQ ID NO:101),
OXC154-R3W/T49R/S88A(=GCT) (SEQ ID NO:102),
OXC154-T49R/S88A(=GCC) (SEQ ID NO:103),
OXC154-R3W/S47F (SEQ ID NO:104),
OXC154-A347G/I372L/L451G (SEQ ID NO:105),
OXC154-R3G(=GGG)/L21G/S60T (SEQ ID NO:106),
OXC154-R3T/L21G/T49R/S88A(=GCT) (SEQ ID NO:107),
OXC154-R3T/L21G/S60T (SEQ ID NO:108),
OXC154-R3W/L21G/S88A(=GCT) (SEQ ID NO:109),
OXC154-L21G/T49R/S60T/S88A(=GCT) (SEQ ID NO:110),
OXC154-A347G/A383V (SEQ ID NO:111),
OXC154-R3W/L21G/T49R/S60T/S88A(=GCT) (SEQ ID NO:112),
OXC154-A18E/S88A(=GCC) (SEQ ID NO:113),
OXC154-R3W/L21G/T49R (SEQ ID NO:114),
OXC154-A347G/L451G (SEQ ID NO:115),
OXC154-A347G/I372L/A383V/L451G (SEQ ID NO:116),
OXC154-I372L/A383V/L451G (SEQ ID NO:117),
OXC154-R3V/T49R/S88A(=GCT) (SEQ ID NO:118),
OXC154-R3G(=GGG)/A18E/S60T (SEQ ID NO:119),
OXC154-A347G/I372L/A383V (SEQ ID NO:120),
OXC154-R3T (SEQ ID NO:121),
OXC154-R3V/A18E/T49R/V97E (SEQ ID NO:122),
OXC154-R3T/L21G/T49R/S60T/S88A(=GCT) (SEQ ID NO:123),
OXC154-R3T/L21G/T49R/V97E (SEQ ID NO:124),
OXC154-R3V/L21G/T49R/S60T (SEQ ID NO:125),
OXC154-G351I/1372L (SEQ ID NO:126),
OXC154-G351I/A383V/L451G (SEQ ID NO:127),
OXC154-G351R/I372L/L451G (SEQ ID NO:128),
OXC154-G351I/I372L/A383V/L451G (SEQ ID NO:129),
OXC154-G351R/I372L/A383V/L451G (SEQ ID NO:130),
OXC154-G351I/I372L/A383V (SEQ ID NO:131),
OXC154-N331G/Q349G/I372L/L451G (SEQ ID NO:132),
OXC154-G351R/A383V/L451G (SEQ ID NO:133),
OXC154-Q349G/A383V/L451G (SEQ ID NO:134),
OXC154-A383V/L451G (SEQ ID NO:135),
OXC154-N331G/Q349G (SEQ ID NO:136),
OXC154-G351I (SEQ ID NO:137),
OXC154-L451G (SEQ ID NO:138),
OXC154-N331G/G351I/I372L/A383V (SEQ ID NO:139),
OXC154-R3G/A18E/S60T/G351I/A383V/L451G (SEQ ID NO:161),
OXC154-R3W/A18E/T49R/V97E/G351I/A383V/L451G (SEQ ID NO:162),
OXC154-R3W/A18E/T49R/V97E/G351I/A383V/L451G (SEQ ID NO:163),
OXC154-R3T/S60T/G351I/A383V/L451G (SEQ ID NO:164),
OXC154-R3G/A18E/S60T/G351I/A383V/L451G (SEQ ID NO: 211);
or
(b) a variant CBDa synthase protein with at least 85%, at least 90%, at least 95%, at least 99% sequence identity, or with 100% identity with any one of the following sequences with the further indicated substitutions from OXC158 (SEQ ID NO:162):
OXC158-W3A/I351G/V383A (SEQ ID NO:195),
OXC158-I351G (SEQ ID NO:173),
OXC158-S367R(=CGG) (SEQ ID NO:174),
OXC158-Q274G (SEQ ID NO:175),
OXC158-I351M (SEQ ID NO:176),
OXC158-V383A (SEQ ID NO:177),
OXC158-S367Q (SEQ ID NO:178),
OXC158-S367N (SEQ ID NO:179),
OXC158-S367R(=AGG) (SEQ ID NO:180),
OXC158-L31E/V383G (SEQ ID NO:189),
OXC158-N138T/V383M/H515E (SEQ ID NO:190),
OXC158-S367K/V383A/P513V (SEQ ID NO:191),
OXC158-V383A (SEQ ID NO:192),
OXC158-W3A/L31E/K226M/S367Q/V383M/S399G/P513V (SEQ ID NO:193),
OXC158-I351GN383A (SEQ ID NO:194), or
OXC158-W3A/N5Q/N28E/I351G/S367R/V383A (SEQ ID NO:196).

9. The method of claim 1, wherein said phytocannabinoid produced is cannabigerol (CBG), cannabigerolic acid (CBGa), cannabigerovarin (CBGv), cannabigerovarinic acid (CBGVa), cannabigerocin (CBGO), cannabigerocinic acid (CBGOa), cannabidiovarinic acid (CBDVa), cannabichromenic acid (CBCa), cannabichromene (CBC), tetrahydrocannabinol (THC), or tetrahydrocannabinolic acid (THCa).

10. The method of claim 9, wherein the transformed host cell produces cannabidiovarinic acid (CBDVa) from cannabigerovarinic acid (CBGVa), optionally in the presence of endogenously produced or exogenously provided butyric acid.

11. The method of claim 1, wherein said host cell is a yeast cell, a bacterial cell, a fungal cell, a protist cell, or a plant cell.

12. The method of claim 11, wherein said host cell is S. cerevisiae, E. coli, Yarrowia lipolytica, or Komagataella phaffii.

13. The method of claim 1, wherein said transformed host cell additionally comprises a polynucleotide encoding a polyketide synthase enzyme, a polynucleotide encoding an olivetolic acid cyclase enzyme, and/or a polynucleotide encoding a prenyltransferase enzyme.

14. The method of claim 1, wherein said transformed host cell additionally comprises a polynucleotide encoding a type III PKS, an acyl-activating enzyme, a prenyltransferase enzyme, and/or an oxidocyclase enzyme.

15. An isolated polypeptide having cannabidiolic acid synthase activity comprising an amino acid sequence of at least 85%, of at least 90%, of at least 95%, of at least 99%, or of 100% sequence identity relative to OXC154 (SEQ ID NO:141), wherein one or more amino acid residues comprise mutations relative to OXC154 (SEQ ID NO:141), at least one of said one or more mutation being located at a position selected from the group consisting of: residues 451, 2, 3, 5, 18, 21, 26, 28, 31, 47, 49, 60, 88, 97, 225, 274, 295, 331, 347, 349, 351, 367, 372, 383, 399, 513, and 515 of SEQ ID NO:141.

16. The isolated polypeptide of claim 15, comprising an amino acid sequence having at least at least 85%, at least 90%, at least 95%, at least 99%, or 100% sequence identity with:
SEQ ID NO:195,
SEQ ID NO:72-139,
SEQ ID NO:161-164,
SEQ ID NO:173-180,
SEQ ID NO:189-194, 196, or 211.

17. An isolated polynucleotide encoding a polypeptide having cannabidiolic acid synthase activity comprising:
(a) a nucleotide sequence according to:
SEQ ID NO:187,
SEQ ID NO:4-71,
SEQ ID NO:157-160,
SEQ ID NO:165-172,
SEQ ID NO:181-186, 188, 209, or 210;
(b) a nucleotide sequence having at least 85%, at least 90%, at least 95%, or at least 99% sequence identity with the nucleotide sequence of (a); or
(c) a nucleotide sequence that hybridizes with the complementary strand of the nucleotide having the sequence of (a).

18. An expression vector comprising the polynucleotide according to claim 17, encoding a protein having CBDa synthase activity.

19. The expression vector of claim 18, wherein the polynucleotide encoding the polypeptide having CBDa synthase activity comprises the nucleotide sequence according to:
SEQ ID NO:187,
SEQ ID NO:4-71,
SEQ ID NO:157-160,
SEQ ID NO:165-172,
SEQ ID NO:181-186, 188, 209 or 210.

20. A host cell transformed with the expression vector of claim 18.

21. The host cell of claim 20, additionally comprising a polynucleotide encoding a polyketide synthase enzyme, a polynucleotide encoding an olivetolic acid cyclase enzyme, and/or a polynucleotide encoding a prenyltransferase enzyme.

22. The host cell of claim 20, additionally comprises a polynucleotide encoding a type III PKS, an acyl-activating enzyme, a prenyltransferase enzyme, and/or an oxidocyclase enzyme.
